(19) United States
(12) Patent Application Publication
(10) Pub. No.: US 2024/0376469 A1
(43) Pub. Date: Nov. 14, 2024

(54) COMPOUNDS AND METHODS FOR MODULATING HUNTINGTIN

(71) Applicant: Ionis Pharmaceuticals, Inc., Carlsbad, CA (US)

(72) Inventors: Bethany Fitzsimmons, Durham, NC (US); Susan M. Freier, San Diego, CA (US); Holly Kordasiewicz, San Diego, CA (US)

(73) Assignee: Ionis Pharmaceuticals, Inc., Carlsbad, CA (US)

(21) Appl. No.: 18/263,194

(22) PCT Filed: Jan. 28, 2022
(86) PCT No.: PCT/US2022/014231

§ 371 Date: Jul. 27, 2023

Related U.S. Application Data
(60) Provisional application No. 63/143,686, filed on Jan. 29, 2021.

(51) Int. Cl. C12N 15/113; A61K 31/7125

(52) U.S. Cl. CPC C12N 15/113; A61K 31/7125; C12N 2310/315; C12N 2310/3341

(57) ABSTRACT

Provided are compounds, methods, and pharmaceutical compositions for reducing the amount or activity of HTT RNA in a cell or subject, and in certain instances reducing the amount of HTT protein in a cell or subject. Such compounds, methods, and pharmaceutical compositions are useful to prevent, treat, or ameliorate at least one symptom or hallmark of a repeat expansion disease. Such repeat expansion diseases include myotonic dystrophy, amyotrophic lateral sclerosis, frontotemporal dementia, Huntington's disease, polyglutamine disorders, Fragile X syndrome, and spinocerebellar ataxia. Such symptoms or hallmarks include brain atrophy, muscle atrophy, nerve degeneration, uncontrolled movement, seizure, tremor, anxiety, and depression.

### SEQUENCE LISTING

[0001] The present application is being filed along with a Sequence Listing in electronic format. The Sequence Listing is provided as a file entitled BIOL0413WOSEQ_ST25.txt, created on Jan. 24, 2022, which is 1.204 MB in size. The information in the electronic format of the sequence listing is incorporated herein by reference in its entirety.

### FIELD

[0002] Provided herein are compounds, pharmaceutical compositions, and methods of use for reducing an amount of HTT RNA in a cell or a subject, and in certain instances reducing the amount of HTT protein in a cell or a subject. In certain embodiments, compounds, methods, and pharmaceutical compositions are useful for ameliorating at least one symptom or hallmark of a repeat expansion disease, e.g., Huntington's Disease. Such symptoms or hallmarks of Huntington's disease include, but are not limited to, brain atrophy, muscle atrophy, nerve degeneration, uncontrolled movement, seizure, tremor, anxiety, and depression.

### BACKGROUND

[0003] Repeat expansion diseases are a group of diseases characterized by a pathological number of consecutive repeat units in a region of a gene, each repeat unit consisting of several linked nucleosides having the same nucleobase sequence as the other repeat units. In general, repeat expansion diseases are genetically inherited. In some cases, an individual is born with a pathological number of repeat units and is symptomatic from a young age. In other cases, an individual is born with a normal, or near normal, number of repeats. However, due to a genetic mutation and genetic instability, the number of repeats increases with cell division, time, and age. The expanded region of the gene ultimately has pathological effects, most often observed as neurological symptoms. Many repeat expansion diseases are classified as a spinocerebellar ataxia, a neurodegenerative disease, or a neuromuscular disease. Non-limiting examples of repeat expansion diseases are myotonic dystrophy (DM1 and DM2); Huntington's disease (HD) and many autosomal dominant spinocerebellar ataxias; some forms of amyotrophic lateral sclerosis and/or frontotemporal dementia; various polyglutamine disorders (including spinal and bulbar muscular atrophy); Fragile X syndrome; and Friedrich's ataxia.

[0004] HD is caused by the expansion of a cytosine-adenine-guanine (CAG) trinucleotide repeat region in IT15, the gene that encodes huntingtin protein (HTT protein). The resulting expanded CAG repeat region encodes an abnormally long polyglutamine (PolyQ) tract in HTT protein, resulting in the expression of a mutant HTT (mHTT) protein. As a result of excessive polyglutamine length, mHTT protein forms aggregates in the cytoplasm and nucleus of CNS neurons (Davies et al., Cell 1997, 90:537-548). Due to its genomic instability, the expanded CAG repeat region can further expand with age and during meiotic transmission to include additional CAG repeats. Individuals with 27 to 35 CAG repeats typically do not develop HD, but their children are at risk of developing HD. Individuals with 35 to 60 CAG repeats typically experience adult-onset HD. Individuals with greater than 60 CAG repeats generally develop juvenile HD, experiencing symptoms of HD before the age of 20 years. Individuals with a normal number of CAG repeats (<27) are not considered to be at risk of developing HD.

### SUMMARY OF THE INVENTION

[0005] Provided herein are compounds, pharmaceutical compositions, and methods of use for reducing the amount of HTT RNA, and in certain embodiments reducing the amount or activity of HTT protein in a cell or a subject. In certain embodiments, the HTT RNA is mHTT RNA. In certain embodiments, the HTT protein is mHTT protein. In certain embodiments, the subject has or is at risk of having a neurodegenerative disease. In certain embodiments, the neurodegenerative disease is a repeat expansion disease. In certain embodiments, the repeat expansion disease is myotonic dystrophy (DM1 and DM2), amyotrophic lateral sclerosis, frontotemporal dementia, Huntington's disease, various polyglutamine disorders, Fragile X syndrome, or a spinocerebellar ataxia (SCA1, SCA2, SCA3, SCA6, SCA7, SCA8, SCA10, SCA17, or Friedrich's ataxia). In certain embodiments, compounds useful for reducing the amount of HTT RNA and/or HTT protein are oligomeric compounds. In certain embodiments, oligomeric compounds comprise modified oligonucleotides.

[0006] Also provided herein are methods useful for ameliorating a symptom or hallmark of a neurodegenerative disease. In certain embodiments, the neurodegenerative disease is a repeat expansion disease. In certain embodiments, the repeat expansion disease is myotonic dystrophy (DM1 and DM2), amyotrophic lateral sclerosis, frontotemporal dementia, Huntington's disease, various polyglutamine disorders, Fragile X syndrome, or a spinocerebellar ataxia (SCA1, SCA2, SCA3, SCA6, SCA7, SCA8, SCA0, SCA17, or Friedrich's ataxia). In certain embodiments, the symptom or hallmark is brain atrophy, reduced brain activity, reduced brain connectivity, muscle atrophy, muscle weakness, muscle cramping, disordered muscle movement, difficulty swallowing, seizure, tremor, nerve degeneration, cardiac failure, impaired glucose tolerance, weight loss, osteoporosis, testicular atrophy, impaired global function, impaired motor function, impaired cognitive function, impaired daily function, impaired attention, impaired visuoperceptual processing, impaired working memory, impaired psychomotor speed, impaired verbal motor output, impaired degree of independence, impaired apathy, impaired learning ability, impaired mental concentration, impaired speech, depression, irritability, anger, impaired mobility, impaired self-care, pain, discomfort, anxiety, suicidal ideation, suicidal behavior, or a combination thereof.

### DETAILED DESCRIPTION OF THE INVENTION

[0007] It is to be understood that both the foregoing general description and the following detailed description are exemplary and explanatory only and are not restrictive. Herein, the use of the singular includes the plural unless specifically stated otherwise. As used herein, the use of “or” means “and/or” unless stated otherwise. Furthermore, the use of the term “including” as well as other forms, such as “includes” and “included”, is not limiting. Also, terms such as “element” or “component” encompass both elements and components comprising one unit and elements and components that comprise more than one subunit, unless specifically stated otherwise.

[0008] The section headings used herein are for organizational purposes only and are not to be construed as limiting the subject matter described. All documents, or portions of documents, cited in this application, including, but not limited to, patents, patent applications, articles, books, and treatises, are hereby expressly incorporated-by-reference for the portions of the document discussed herein, as well as in their entirety.

### Definitions

[0009] Unless specific definitions are provided, the nomenclature used in connection with, and the procedures and techniques of, analytical chemistry, synthetic organic chemistry, and medicinal and pharmaceutical chemistry described herein are those well-known and commonly used in the art. Where permitted, all patents, applications, published applications and other publications and other data referred to throughout the disclosure are incorporated by reference herein in their entirety.

[0010] Unless otherwise indicated, the following terms have the following meanings:

[0011] As used herein, “2′-deoxynucleoside” means a nucleoside comprising a 2′-H(H) deoxyribosyl sugar moiety. In certain embodiments, a 2′-deoxynucleoside is a 2′-β-D-deoxynucleoside and comprises a 2′-β-D-deoxyribosyl sugar moiety, which has the β-D configuration as found in naturally occurring deoxyribonucleic acids (DNA). In certain embodiments, a 2′-deoxynucleoside may comprise a modified nucleobase or may comprise an RNA nucleobase (uracil).

[0012] As used herein, “2′-MOE” or “2′-MOE sugar moiety” or “2′-O-methoxyethylribose modified sugar” means a 2′-OCH₂CH₂OCH₃ group in place of the 2′-OH group of a ribosyl sugar moiety. “MOE” means methoxyethyl. Unless otherwise indicated, a 2′-MOE has the β-D stereochemical configuration.

[0013] As used herein, “2′-MOE nucleoside” means a nucleoside comprising a 2′-MOE sugar moiety.

[0014] As used herein, “2′-OMe” or “2′-O-methyl sugar moiety” means a 2′-OCH₃ group in place of the 2′—OH group of a ribosyl sugar moiety. Unless otherwise indicated, a 2′-OMe has the β-D stereochemical configuration.

[0015] As used herein, “2′-OMe nucleoside” means a nucleoside comprising a 2′-OMe sugar moiety.

[0016] As used herein, “2′-substituted nucleoside” means a nucleoside comprising a 2′-substituted furanosyl sugar moiety. As used herein, “2′-substituted” in reference to a sugar moiety means a sugar moiety comprising at least one 2′-substituent group other than H or OH.

[0017] As used herein, “5-methylcytosine” means a cytosine modified with a methyl group attached to the 5 position. A 5-methylcytosine is a modified nucleobase.

[0018] As used herein, “abasic sugar moiety” means a sugar moiety of a nucleoside that is not attached to a nucleobase. Such abasic sugar moieties are sometimes referred to in the art as “abasic nucleosides.”

[0019] As used herein, “administration” or “administering” means providing a pharmaceutical agent or composition to a subject.

[0020] As used herein, “ameliorate” in reference to a treatment means improvement in at least one symptom or hallmark relative to the same symptom or hallmark in the absence of the treatment. In certain embodiments, amelioration is the reduction in the severity or frequency of a symptom or hallmark, or the delayed onset of or slowing of progression in the severity or frequency of a symptom or hallmark. In certain embodiments, the symptom or hallmark is brain atrophy, reduced brain activity, reduced brain connectivity, muscle atrophy, muscle weakness, muscle cramping, difficulty swallowing, seizure, tremor, nerve degeneration, cardiac failure, impaired glucose tolerance, weight loss, osteoporosis, testicular atrophy, impaired global function, impaired motor function, impaired cognitive function, impaired daily function, impaired attention, impaired visuoperceptual processing, impaired working memory, impaired psychomotor speed, impaired verbal motor output, impaired degree of independence, impaired apathy, impaired learning ability, impaired mental concentration, impaired speech, depression, irritability, anger, impaired mobility, impaired self-care, pain, discomfort, anxiety, suicidal ideation, or suicidal behavior. The progression or severity of indicators may be determined by subjective or objective measures, which are known to those skilled in the art.

[0021] As used herein, “antisense activity” means any detectable and/or measurable change attributable to the hybridization of an antisense compound to its target nucleic acid. In certain embodiments, antisense activity is a decrease in the amount or expression of a target nucleic acid or protein encoded by such target nucleic acid compared to target nucleic acid levels or target protein levels in the absence of the antisense compound.

[0022] As used herein, “antisense agent” means an antisense compound and optionally one or more additional features, such as a sense compound.

[0023] As used herein, “antisense compound” means an oligomeric compound capable of achieving at least one antisense activity. In certain embodiments, an antisense compound further comprises one or more additional features, such as a conjugate group.

[0024] As used herein, “sense compound” means a sense oligonucleotide and optionally one or more additional features, such as a conjugate group. As used herein, “bicyclic nucleoside” or “BNA” means a nucleoside comprising a bicyclic sugar moiety.

[0025] As used herein, “bicyclic sugar” or “bicyclic sugar moiety” means a modified sugar moiety comprising two rings, wherein the second ring is formed via a bridge connecting two of the atoms in the first ring thereby forming a bicyclic structure. In certain embodiments, the first ring of the bicyclic sugar moiety is a furanosyl sugar moiety. In certain embodiments, the furanosyl sugar moiety is a ribosyl sugar moiety. In certain embodiments, the bicyclic sugar moiety does not comprise a furanosyl sugar moiety.

[0026] As used herein, “CAG repeat” means one of multiple contiguous trinucleotide units, wherein each trinucleotide unit consists of three contiguous nucleosides having a nucleobase sequence from 5′ to 3′ of cytosine (C), adenine (A), and guanine (G).

[0027] As used herein, “cerebrospinal fluid” or “CSF” means the fluid filling the space around the brain and spinal cord. “Artificial cerebrospinal fluid” or “aCSF” means a prepared or manufactured fluid that has certain properties of cerebrospinal fluid. aCSF is a buffered solution that closely matches the electrolyte concentrations of CSF.

[0028] As used herein, “cleavable moiety” means a bond or group of atoms that is cleaved under physiological conditions, for example, inside a cell, a subject, or a human.

[0029] As used herein, “cell-targeting moiety” means a conjugate moiety that interacts with a cell or a portion thereof. In certain embodiments, the cell-targeting moiety binds a receptor on a surface of a cell.

[0030] As used herein, “chirally enriched population” means a plurality of molecules of identical molecular formula, wherein the number or percentage of molecules within the population that contain a particular stereochemical configuration at a particular chiral center is greater than the number or percentage of molecules expected to contain the same particular stereochemical configuration at the same particular chiral center within the population if the particular chiral center were stereorandom. Chirally enriched populations of molecules having multiple chiral centers within each molecule may contain one or more stereorandom chiral centers. In certain embodiments, the molecules are modified oligonucleotides. In certain embodiments, the molecules are compounds comprising modified oligonucleotides.

[0031] As used herein, “chirally controlled” in reference to an internucleoside linkage means chirality at that linkage is enriched for a particular stereochemical configuration.

[0032] As used herein, “complementary” in reference to an oligonucleotide means that at least 70% of the nucleobases of the oligonucleotide or one or more portions thereof and the nucleobases of a target nucleic acid or one or more portions thereof are capable of hydrogen bonding with one another when the nucleobase sequence of the oligonucleotide and the other nucleic acid are aligned in opposing directions. As used herein, “complementary nucleobases” means nucleobases that are capable of forming hydrogen bonds with one another. Complementary nucleobase pairs include adenine (A) and thymine (T), adenine (A) and uracil (U), cytosine (C) and guanine (G), 5-methylcytosine (mC) and guanine (G). Certain modified nucleobases that pair with natural nucleobases or with other modified nucleobases are known in the art. For example, inosine can pair with adenosine, cytosine, or uracil. Complementary oligonucleotides and/or target nucleic acids need not have nucleobase complementarity at each nucleoside. Rather, some mismatches are tolerated. As used herein, “fully complementary” or “100% complementary” in reference to an oligonucleotide, or a portion thereof, means that the oligonucleotide, or portion thereof, is complementary to another oligonucleotide or target nucleic acid at each nucleobase of the shorter of the two oligonucleotides, or at each nucleoside if the oligonucleotides are the same length.

[0033] As used herein, “conjugate group” means a group of atoms that is directly attached to an oligonucleotide. Conjugate groups include a conjugate moiety and a conjugate linker that attaches the conjugate moiety to the oligonucleotide. In certain embodiments, the conjugate moiety comprises a cell-targeting moiety.

[0034] As used herein, “conjugate linker” means a single bond or a group of atoms comprising at least one bond that connects a conjugate moiety to an oligonucleotide.

[0035] As used herein, “conjugate moiety” means a group of atoms that is attached to an oligonucleotide via a conjugate linker.

[0036] As used herein, “constrained ethyl” or “cEt” or “cEt modified sugar moiety” means a β-D ribosyl bicyclic sugar moiety wherein the second ring of the bicyclic sugar is formed via a bridge connecting the 4′-carbon and the 2′-carbon of the β-D ribosyl sugar moiety, wherein the bridge has the formula 4′-CH(CH₃)—O-2′, and wherein the methyl group of the bridge is in the S configuration.

[0037] As used herein, “cEt nucleoside” means a nucleoside comprising a cEt modified sugar moiety.

[0038] As used herein, “contiguous” in the context of an oligonucleotide refers to nucleosides, nucleobases, sugar moieties, or internucleoside linkages that are immediately adjacent to each other. For example, “contiguous nucleobases” means nucleobases that are immediately adjacent to each other in a sequence.

[0039] As used herein, “deoxy region” means a region of 5-12 contiguous nucleotides, wherein at least 70% of the nucleosides are 2′-β-D-deoxynucleosides. In certain embodiments, each nucleoside is selected from a 2′-β-D-deoxynucleoside, a bicyclic nucleoside, and a 2′-substituted nucleoside. In certain embodiments, a deoxy region supports RNase H activity. In certain embodiments, a deoxy region is the gap or internal region of a gapmer.

[0040] As used herein, “diluent” means an ingredient in a composition that lacks pharmacological activity, but is pharmaceutically necessary or desirable. For example, the diluent in an injected composition can be a liquid, e.g. aCSF, PBS, or saline solution.

[0041] As used herein, “gapmer” means an oligonucleotide having a central region comprising a plurality of nucleosides that support RNase H1 cleavage positioned between a 5′-region and a 3′-region. Herein, the nucleosides of the 5′-region and 3′-region each comprise a 2′-modified furanosyl sugar moiety, and the 3′- and 5′-most nucleosides of the central region each comprise a sugar moiety independently selected from a 2′-deoxyfuranosyl sugar moiety or a sugar surrogate. The positions of the central region refer to the order of the nucleosides of the central region and are counted starting from the 5′-end of the central region. Thus, the 5′-most nucleoside of the central region is at position 1 of the central region. The “central region” may be referred to as a “gap”, and the “5′-region” and “3′-region” may be referred to as “wings” or “wing segments.” In certain embodiments, the central region is a deoxy region. Unless otherwise indicated, a gapmer may comprise one or more modified internucleoside linkages and/or modified nucleobases and such modifications do not necessarily follow the gapmer pattern of the sugar modifications.

[0042] As used herein, the term “MOE gapmer” indicates a gapmer having a gap comprising 2′-β-D-deoxynucleosides and wings comprising 2′-MOE nucleosides.

[0043] As used herein, the term “mixed wing gapmer” indicates a gapmer having wings comprising modified nucleosides comprising at least two different sugar modifications.

[0044] As used herein, “hotspot region” is a range of nucleobases on a target nucleic acid that is amenable to oligomeric agent or oligomeric compound-mediated reduction of the amount or activity of the target nucleic acid.

[0045] As used herein, “HTT RNA” is the RNA expression product of the human gene, IT15. “mHTT RNA” is the RNA expression product of the human gene, IT15, that contains 27 or more contiguous CAG repeats.

[0046] As used herein, “HTT protein” is the protein expression product of HTT RNA. “mHTT protein” is the protein expression product of mHTT.

[0047] As used herein, “hybridization” means the annealing of oligonucleotides and/or nucleic acids. While not limited to a particular mechanism, the most common mechanism of hybridization involves hydrogen bonding, which may be Watson-Crick, Hoogsteen or reversed Hoogsteen hydrogen bonding, between complementary nucleobases. In certain embodiments, complementary nucleic acid molecules include, but are not limited to, an antisense compound and a nucleic acid target. In certain embodiments, complementary nucleic acid molecules include, but are not limited to, an oligonucleotide and a nucleic acid target.

[0048] As used herein, “IT15 gene” refers to a genomic sequence encoding an HTT RNA. In general, a human has two IT15 genes which may have the same or different nucleobase sequences.

[0049] As used herein, “identifying a subject at risk for developing a repeat expansion disease” means identifying a subject having been diagnosed with a repeat expansion disease or identifying a subject that has a risk factor for developing a repeat expansion disease.

[0050] As used herein, “internucleoside linkage” means the covalent linkage between contiguous nucleosides in an oligonucleotide. As used herein, “modified internucleoside linkage” means any internucleoside linkage other than a phosphodiester internucleoside linkage. “Phosphorothioate internucleoside linkage” or “PS internucleoside linkage” is a modified internucleoside linkage in which one of the non-bridging oxygen atoms of a phosphodiester internucleoside linkage is replaced with a sulfur atom.

[0051] As used herein, “inverted nucleoside” means a nucleotide having a 3′ to 3′ and/or 5′ to 5′ internucleoside linkage, as shown herein.

[0052] As used herein, “inverted sugar moiety” means the sugar moiety of an inverted nucleoside or an abasic sugar moiety having a 3′ to 3′ and/or 5′ to 5′ internucleoside linkage.

[0053] As used herein, “linked nucleosides” are nucleosides that are connected in a contiguous sequence (i.e., no additional nucleosides are presented between those that are linked).

[0054] As used herein, “linker-nucleoside” means a nucleoside that links, either directly or indirectly, an oligonucleotide to a conjugate moiety. Linker-nucleosides are located within the conjugate linker of an oligomeric compound. Linker-nucleosides are not considered part of the oligonucleotide portion of an oligomeric compound even if they are contiguous with the oligonucleotide.

[0055] As used herein, “mismatch” or “non-complementary” means a nucleobase of a first nucleic acid sequence that is not complementary with the corresponding nucleobase of a second nucleic acid sequence when the first and second nucleic acid sequences are aligned in opposing directions.

[0056] As used herein, “motif” means the pattern of unmodified and/or modified sugar moieties, nucleobases, and/or internucleoside linkages, in an oligonucleotide.

[0057] As used herein, “non-bicyclic modified sugar moiety” means a modified sugar moiety that comprises a modification, such as a substituent, that does not form a bridge between two atoms of the sugar to form a second ring.

[0058] As used herein, “nucleobase” means an unmodified nucleobase or a modified nucleobase. As used herein an “unmodified nucleobase” is adenine (A), thymine (T), cytosine (C), uracil (U), or guanine (G). As used herein, a “modified nucleobase” is a group of atoms other than unmodified A, T, C, U, or G capable of pairing with at least one unmodified nucleobase. A “5-methylcytosine” is a modified nucleobase. A universal base is a modified nucleobase that can pair with any one of the five unmodified nucleobases.

[0059] As used herein, “nucleobase sequence” means the order of contiguous nucleobases in a target nucleic acid or oligonucleotide independent of any sugar or internucleoside linkage modification.

[0060] As used herein, “nucleoside” means a compound, or a fragment of a compound, comprising a nucleobase and a sugar moiety. The nucleobase and sugar moiety are each, independently, unmodified or modified.

[0061] As used herein, “modified nucleoside” means a nucleoside comprising a modified nucleobase and/or a modified sugar moiety. Modified nucleosides include abasic nucleosides, which lack a nucleobase. “Linked nucleosides” are nucleosides that are connected in a contiguous sequence (i.e., no additional nucleosides are presented between those that are linked).

[0062] As used herein, “oligomeric agent” means an oligomeric compound and optionally one or more additional features, such as a second oligomeric compound. An oligomeric agent may be a single-stranded oligomeric compound or may be an oligomeric duplex formed by two complementary oligomeric compounds.

[0063] As used herein, “oligomeric compound” means an oligonucleotide and optionally one or more additional features, such as a conjugate group or terminal group. An oligomeric compound may be paired with a second oligomeric compound that is complementary to the first oligomeric compound or may be unpaired. A “singled-stranded oligomeric compound” is an unpaired oligomeric compound.

[0064] The term “oligomeric duplex” means a duplex formed by two oligomeric compounds having complementary nucleobase sequences. Each oligomeric compound of an oligomeric duplex may be referred to as a “duplexed oligomeric compound.”

[0065] As used herein, “oligonucleotide” means a strand of linked nucleosides connected via internucleoside linkages, wherein each nucleoside and internucleoside linkage may be modified or unmodified. Unless otherwise indicated, oligonucleotides consist of 8-50 linked nucleosides. As used herein, “modified oligonucleotide” means an oligonucleotide, wherein at least one nucleoside or internucleoside linkage is modified. As used herein, “unmodified oligonucleotide” means an oligonucleotide that does not comprise any nucleoside modifications or internucleoside modifications. An oligonucleotide may be paired with a second oligonucleotide that is complementary to the oligonucleotide or it may be unpaired. A “single-stranded oligonucleotide” is an unpaired oligonucleotide. A “double-stranded oligonucleotide” is an oligonucleotide that is paired with a second oligonucleotide.

[0066] As used herein, “pharmaceutically acceptable carrier or diluent” means any substance suitable for use in administering to a subject. Certain such carriers enable pharmaceutical compositions to be formulated as, for example, tablets, pills, dragees, capsules, liquids, gels, syrups, slurries, suspension and lozenges for the oral ingestion by an animal. In certain embodiments, a pharmaceutically acceptable carrier or diluent is sterile water, sterile saline, sterile buffer solution, or sterile artificial cerebrospinal fluid. In certain embodiments, a pharmaceutically acceptable carrier or diluent is phosphate buffered saline. In certain embodiments, a pharmaceutically acceptable carrier or diluent is artificial cerebrospinal fluid.

[0067] As used herein, “pharmaceutically acceptable salts” means physiologically and pharmaceutically acceptable salts of compounds. Pharmaceutically acceptable salts retain the desired biological activity of the parent compound and do not impart undesired toxicological effects thereto. As used herein, “potassium salt” means a salt of a modified oligonucleotide, wherein the cation of the salt is potassium.

[0068] As used herein, “sodium salt” means a salt of a modified oligonucleotide, wherein the cation of the salt is sodium.

[0069] As used herein, “pharmaceutical composition” means a mixture of substances suitable for administering to a subject. For example, a pharmaceutical composition may comprise an oligomeric compound and a sterile aqueous solution. In certain embodiments, a pharmaceutical composition shows activity in free uptake assay in certain cell lines.

[0070] As used herein, “prevent” or “preventing” refers to delaying or forestalling the onset or development of a neurodegenerative disease, or a symptom or hallmark thereof, for a period of time or indefinitely.

[0071] As used herein, “prodrug” means a therapeutic agent in a first form outside the body that is converted to a second form within a subject or cells thereof. Typically, conversion of a prodrug within the subject is facilitated by the action of an enzymes (e.g., endogenous or viral enzyme) or chemicals present in cells or tissues and/or by physiologic conditions. In certain embodiments, the first form of the prodrug is less active than the second form.

[0072] As used herein, “reducing the amount or activity,” or “inhibiting the amount or activity,” in connection with a gene transcript (RNA) refers to a reduction or blockade of the transcriptional expression or activity relative to the transcriptional expression or activity in an untreated or control sample and does not necessarily indicate a total elimination of transcriptional expression or activity.

[0073] As used herein, “reducing the amount or activity,” or “inhibiting the amount or activity,” in connection with a protein refers to a reduction or blockade of the protein's expression or activity relative to the protein expression or activity in an untreated or control sample and does not necessarily indicate a total elimination of protein expression or activity.

[0074] As used herein, “repeat expansion disease” means a disease associated with an increased number of contiguous repeat units in a region of a gene of a subject, each repeat unit consisting of 3-10 linked nucleosides having the same nucleobase sequence as the other repeat units, relative to a control subject without the disease. In certain embodiments, the subject experiences a symptom or hallmark of the repeat expansion disease.

[0075] As used herein, “repeat region” means a region of a gene comprising three or more contiguous repeat units, each repeat unit consisting of 3-10 linked nucleosides having the same nucleobase sequence as the other repeat units. Non-limiting examples of repeat units are CTG, CUG, CAG, CUG, GGGGCC, CAG, GAA, CAA and ATTCT.

[0076] As used herein, “RNA” means an RNA transcript and includes pre-mRNA and mature mRNA unless otherwise specified.

[0077] As used herein, “RNAi agent” means an antisense agent that acts, at least in part, through RISC or Ago2 to modulate a target nucleic acid and/or protein encoded by a target nucleic acid. RNAi agents include, but are not limited to double-stranded siRNA, single-stranded RNA (ssRNAi), and microRNA, including microRNA mimics. RNAi agents may comprise conjugate groups and/or terminal groups. In certain embodiments, an RNAi agent modulates the amount, activity, and/or splicing of a target nucleic acid. The term RNAi agent excludes antisense agents that act through RNase H.

[0078] As used herein, “RNase H agent” means an antisense agent that acts through RNase H to modulate a target nucleic acid and/or protein encoded by a target nucleic acid. In certain embodiments, RNase H agents are single-stranded. In certain embodiments, RNase H agents are double-stranded. RNase H agents may comprise conjugate groups and/or terminal groups. In certain embodiments, an RNase H agent modulates the amount and/or activity of a target nucleic acid. The term RNase H agent excludes antisense agents that act principally through RISC/Ago2.

[0079] As used herein, “single-stranded” means a nucleic acid (including but not limited to an oligonucleotide) that is unpaired and is not part of a duplex. Single-stranded compounds are capable of hybridizing with complementary nucleic acids to form duplexes, at which point they are no longer single-stranded.

[0080] As used herein, “stabilized phosphate group” means a 5′-phosphate analog that is metabolically more stable than a 5′-phosphate as naturally occurs on DNA or RNA.

[0081] As used herein, “standard in vitro assay” means the assay described in Examples 1, 2, and 3, and reasonable variations thereof.

[0082] As used herein, “standard in vivo assay” means the assay described in Example 9 and reasonable variations thereof.

[0083] As used herein, “stereorandom chiral center” in the context of a population of molecules of identical molecular formula means a chiral center having a random stereochemical configuration. For example, in a population of molecules comprising a stereorandom chiral center, the number of molecules having the (S) configuration of the stereorandom chiral center may be but is not necessarily the same as the number of molecules having the (R) configuration of the stereorandom chiral center. The stereochemical configuration of a chiral center is considered random when it is the result of a synthetic method that is not designed to control the stereochemical configuration. In certain embodiments, a stereorandom chiral center is a stereorandom phosphorothioate internucleoside linkage.

[0084] As used herein, “subject” means a human or non-human animal. In certain embodiments, the subject is a human subject. A “subject in need thereof,” is a subject who would benefit from administration of a modified oligonucleotide disclosed herein. In certain embodiments, the subject in need thereof has HD.

[0085] As used herein, “sugar moiety” means an unmodified sugar moiety or a modified sugar moiety. As used herein, “unmodified sugar moiety” means a 2′-OH(H) β-D-ribosyl sugar moiety, as found in RNA (an “unmodified RNA sugar moiety”), or a 2′-H(H) β-D-deoxyribosyl sugar moiety, as found in DNA (an “unmodified DNA sugar moiety”). Unmodified sugar moieties have one hydrogen at each of the 1′, 3′, and 4′ positions, an oxygen at the 3′ position, and two hydrogens at the 5′ position. As used herein, “modified sugar moiety” or “modified sugar” means a modified furanosyl sugar moiety or a sugar surrogate.

[0086] As used herein, “sugar surrogate” means a modified sugar moiety having other than a furanosyl moiety that can link a nucleobase to another group, such as an internucleoside linkage, conjugate group, or terminal group in an oligonucleotide. Modified nucleosides comprising sugar surrogates can be incorporated into one or more positions within an oligonucleotide and such oligonucleotides are capable of hybridizing to complementary oligomeric compounds or target nucleic acids.

[0087] As used herein, “symptom or hallmark” means any physical feature or test result that indicates the existence or extent of a disease or disorder. In certain embodiments, a symptom is apparent to a subject or to a medical professional examining or testing said subject. In certain embodiments, a hallmark is apparent upon invasive diagnostic testing, including, but not limited to, post-mortem tests.

[0088] As used herein, “target nucleic acid” and “target RNA” mean a nucleic acid that an antisense compound is designed to affect. Target RNA means an RNA transcript and includes pre-mRNA and mRNA unless otherwise specified.

[0089] As used herein, “target region” means a portion of a target nucleic acid to which an oligomeric compound is designed to hybridize.

[0090] As used herein, “terminal group” means a chemical group or group of atoms that is covalently linked to a terminus of an oligonucleotide.

[0091] As used herein, “treating” means improving a subject's disease or condition by administering an oligomeric agent or oligomeric compound described herein. In certain embodiments, treating a subject improves a symptom relative to the same symptom in the absence of the treatment. In certain embodiments, treatment reduces in the severity or frequency of a symptom, or delays the onset of a symptom, slows the progression of a symptom, or slows the severity or frequency of a symptom.

[0092] As used herein, “therapeutically effective amount” means an amount of a pharmaceutical agent that provides a therapeutic benefit to a subject. For example, a therapeutically effective amount improves a symptom or hallmark of a disease.

### CERTAIN EMBODIMENTS

The present disclosure provides the following non-limiting numbered embodiments:

[0093] Embodiment 1. An oligomeric compound comprising a modified oligonucleotide consisting of 12 to 30 linked nucleosides, wherein the nucleobase sequence of the modified oligonucleotide is at least 80% complementary to an equal length portion of an HTT RNA, and wherein the modified oligonucleotide comprises at least one modification selected from a modified sugar moiety and a modified internucleoside linkage.

[0094] Embodiment 2. An oligomeric compound comprising a modified oligonucleotide consisting of 12 to 30 linked nucleosides and having a nucleobase sequence comprising at least 12, at least 13, at least 14, at least 15, at least 16, at least 17, at least 18, at least 19, or 20 contiguous nucleobases of any of SEQ ID NOs: 26-3707.

[0095] Embodiment 3. An oligomeric compound comprising a modified oligonucleotide consisting of 12 to 30 linked nucleosides and having a nucleobase sequence comprising:
[0096] a) at least 12, at least 13, at least 14, at least 15, at least 16, or 17 contiguous nucleobases of any of SEQ ID NOs: 26-857 or 3552-3590;
[0097] b) at least 12, at least 13, at least 14, at least 15, at least 16, at least 17, at least 18, at least 19, or 20 contiguous nucleobases of any of SEQ ID NOs: 858-3551 or 3591-3682; or
[0098] c) at least 12, at least 13, at least 14, at least 15, at least 16, at least 17, or 18 contiguous nucleobases of any of SEQ ID NOs: 3683-3707.

[0099] Embodiment 4. An oligomeric compound comprising a modified oligonucleotide consisting of 12 to 30 linked nucleosides and having a nucleobase sequence comprising at least 8, at least 9, at least 10, at least 11, at least 12, at least 13, at least 14, at least 15, at least 16, at least 17, at least 18, at least 19, or 20 contiguous nucleobases complementary to:
[0100] an equal length portion of nucleobases 56443-56500 of SEQ ID NO: 2;
[0101] an equal length portion of nucleobases 62833-62860 of SEQ ID NO: 2;
[0102] an equal length portion of nucleobases 69788-69824 of SEQ ID NO: 2;
[0103] an equal length portion of nucleobases 9984-10008 of SEQ ID NO: 2;
[0104] an equal length portion of nucleobases 106863-106924 of SEQ ID NO: 2;
[0105] an equal length portion of nucleobases 115297-115337 of SEQ ID NO: 2;
[0106] an equal length portion of nucleobases 117868-117902 of SEQ ID NO: 2;
[0107] an equal length portion of nucleobases 119644-119670 of SEQ ID NO: 2;
[0108] an equal length portion of nucleobases 126780-126829 of SEQ ID NO: 2; or
[0109] an equal length portion of nucleobases 130388-130418 of SEQ ID NO: 2;
[0110] wherein the modified oligonucleotide comprises at least one modification selected from a modified sugar moiety and a modified internucleoside linkage.

[0111] Embodiment 5. An oligomeric compound comprising a modified oligonucleotide consisting of 12 to 30 linked nucleosides and having a nucleobase sequence comprising at least 8, at least 9, at least 10, at least 11, at least 12, at least 13, at least 14, at least 15, at least 16, at least 17, at least 18, at least 19, or 20 contiguous nucleobases of a sequence selected from:
[0112] SEQ ID NOs: 1184, 1274, 1331, 1455, 1481, 1562, and 1684;
[0113] SEQ ID NOs: 3029, 3104, 3557, 3562, 3569, 3586, 3610, 3620, 3622, 3623, 3627, 3634, 3664, 3687, 3692, and 3697;
[0114] SEQ ID NOs: 2750, 2814, 2887, 2991, and 3090;
[0115] SEQ ID NOs: 2581, 2640, 2736, 2857, and 2917;
[0116] SEQ ID NOs: 1105, 1232, 1249, 3330, 3342, 3344, 3362, 3382, 3411, 3419, 3439, 3456, 3475, 3488, 3491, 3511, 3531, 3550, and 3551;
[0117] SEQ ID NOs: 2208, 2310, 2335, 2471, 3553, 3559, 3563, 3565, 3570, 3580, 3581, 3583, 3585, 3589, 3593, 3594, 3597, 3600, 3601, 3604, 3614, 3616, 3630, 3631, 3637, 3648, 3650, 3652, 3653, 3660, 3661, 3662, 3684, and 3689;
[0118] SEQ ID NOs: 2644, 2770, 2786, 2916, 3574, 3576, 3578, 3587, 3665, 3666, 3667, 3668, 3669, 3670, 3671, 3672, 3673, 3674, 3675, 3676, 3686, 3694, and 3698;
[0119] SEQ ID NOs: 919, 940, 3677, 3678, 3679, 3680, 3681, 3682, 3705, 3706, and 3707;
[0120] SEQ ID NOs: 1576, 1652, 1771, 1813, 1933, 1987, 2078, 3552, 3555, 3558, 3560, 3572, 3573, 3575, 3579, 3584, 3598, 3608, 3611, 3613, 3619, 3628, 3635, 3644, 3646, 3649, 3663, 3683, 3688, 3690, 3700, 3701, 3702, 3703, and 3704; and
[0121] SEQ ID NOs: 1343, 1406, 1539, 3335, 3401, 3472, 3477, 3519, and 3591;

[0122] wherein the modified oligonucleotide comprises at least one modification selected from a modified sugar moiety and a modified internucleoside linkage.

[0123] Embodiment 6. The oligomeric compound of any of embodiments 1-5, wherein the modified oligonucleotide has a nucleobase sequence that is at least 85%, at least 90%, at least 95%, or 100% complementary to the nucleobase sequence of any one of SEQ ID NOS: 1-5 when measured across the entire nucleobase sequence of the modified oligonucleotide.

[0124] Embodiment 7. The oligomeric compound of any of embodiments 1-6, wherein the modified oligonucleotide consists of 10 to 25, 10 to 30, 12 to 20, 12 to 25, 12 to 30, 13 to 20, 13 to 25, 13 to 30, 14 to 20, 14 to 25, 14 to 30, 15 to 20, 15 to 25, 15 to 30, 16 to 18, 16 to 20, 16 to 25, 16 to 30, 17 to 20, 17 to 25, 17 to 30, 18 to 20, 18 to 25, 18 to 30, 19 to 20, 19 to 25, 19 to 30, 20 to 25, 20 to 30, 21 to 25, 21 to 30, 22 to 25, 22 to 30, 23 to 25, or 23 to 30 linked nucleosides.

[0125] Embodiment 8. The oligomeric compound of any of embodiments 1-7, wherein the modified oligonucleotide comprises at least one modified nucleoside.

[0126] Embodiment 9. The oligomeric compound of embodiment 8, wherein the modified oligonucleotide comprises at least one modified nucleoside comprising a modified sugar moiety.

[0127] Embodiment 10. The oligomeric compound of embodiment 9, wherein the modified oligonucleotide comprises at least one modified nucleoside comprising a bicyclic sugar moiety.

[0128] Embodiment 11. The oligomeric compound of embodiment 10, wherein the bicyclic sugar moiety has a 2′-4′ bridge selected from —O—CH₂—; and —O—CH(CH₃)—.

[0129] Embodiment 12. The oligomeric compound of any of embodiments 8-11, wherein the modified oligonucleotide comprises at least one modified nucleoside comprising a non-bicyclic modified sugar moiety.

[0130] Embodiment 13. The oligomeric compound of embodiment 12, wherein the non-bicyclic modified sugar moiety is a 2′-MOE modified sugar moiety or a 2′-cEt modified sugar moiety.

[0131] Embodiment 14. The oligomeric compound of any of embodiments 8-13, wherein the modified oligonucleotide comprises at least one modified nucleoside comprising a sugar surrogate.

[0132] Embodiment 15. The oligomeric compound of embodiment 14, wherein the sugar surrogate is any of morpholino, modified morpholino, PNA, THP, and F-HNA.

[0133] Embodiment 16. The oligomeric compound of any of embodiments 1-15, wherein the modified oligonucleotide is a gapmer.

[0134] Embodiment 17. The oligomeric compound of any of embodiments 1-16, wherein the modified oligonucleotide has a sugar motif comprising:
[0135] a 5′-region consisting of 1-6 linked 5′-region nucleosides;
[0136] a central region consisting of 6-10 linked central region nucleosides; and
[0137] a 3′-region consisting of 1-6 linked 3′-region nucleosides,
[0138] wherein each of the 5′-region nucleosides and each of the 3′-region nucleosides comprises a modified sugar moiety and each of the central region nucleosides comprises a 2′-β-D-deoxyribosyl sugar moiety.

[0139] Embodiment 18. The oligomeric compound of embodiment 17, wherein
[0140] the 5′-region consists of 5 linked 5′-region nucleosides;
[0141] the central region consists of 10 linked central region nucleosides; and
[0142] the 3′-region consists of 5 linked 3′-region nucleosides, and
[0143] wherein each of the 5′-region nucleosides and each of the 3′-region nucleosides comprises a 2′-MOE sugar moiety and each of the central region nucleosides comprises a 2′-β-D-deoxyribosyl sugar moiety.

[0144] Embodiment 19. The oligomeric compound of embodiment 17, wherein
[0145] the 5′-region consists of 6 linked 5′-region nucleosides;
[0146] the central region consists of 10 linked central region nucleosides; and
[0147] the 3′-region consists of 4 linked 3′-region nucleosides, and
[0148] wherein each of the 5′-region nucleosides and each of the 3′-region nucleosides comprises a 2′-MOE sugar moiety and each of the central region nucleosides comprises a 2′-β-D-deoxyribosyl sugar moiety.

[0149] Embodiment 20. The oligomeric compound of embodiment 17, wherein
[0150] the 5′-region consists of 5 linked 5′-region nucleosides;
[0151] the central region consists of 8 linked central region nucleosides; and
[0152] the 3′-region consists of 5 linked 3′-region nucleosides, and
[0153] wherein each of the 5′-region nucleosides and each of the 3′-region nucleosides comprises a 2′-MOE sugar moiety and each of the central region nucleosides comprises a 2′-β-D-deoxyribosyl sugar moiety.

[0154] Embodiment 21. The oligomeric compound of embodiment 17, wherein
[0155] the 5′-region consists of 4 linked 5′-region nucleosides;
[0156] the central region consists of 8 linked central region nucleosides; and
[0157] the 3′-region consists of 5 linked 3′-region nucleosides, and
[0158] wherein each of the 5′-region nucleosides and each of the 3′-region nucleosides comprises a modified sugar moiety selected from a 2′-MOE sugar moiety and a 2′-cEt sugar moiety and each of the central region nucleosides comprises a 2′-β-D-deoxyribosyl sugar moiety.

[0159] Embodiment 22. The oligomeric compound of any of embodiments 1-21, wherein the modified oligonucleotide comprises at least one modified internucleoside linkage.

[0160] Embodiment 23. The oligomeric compound of embodiment 22, wherein each internucleoside linkage of the modified oligonucleotide is a modified internucleoside linkage.

[0161] Embodiment 24. The oligomeric compound of embodiment 22 or embodiment 23, wherein each internucleoside linkage is a phosphorothioate internucleoside linkage.

[0162] Embodiment 25. The oligomeric compound of embodiment 22, wherein the modified oligonucleotide comprises at least one phosphodiester internucleoside linkage.

[0163] Embodiment 26. The oligomeric compound of any of embodiments 22, 23, or 25, wherein each internucleoside linkage is independently selected from a phosphodiester internucleoside linkage and a phosphorothioate internucleoside linkage.

[0164] Embodiment 27. The oligomeric compound of any of embodiments 22, 23, or 25-26, wherein at least 4, at least 5, at least 6, at least 7, at least 8, at least 9, at least 10, at least 11, at least 12, at least 13, at least 14, at least 15, at least 16, at least 17, at least 18, or 19 internucleoside linkages of the modified oligonucleotide are phosphorothioate internucleoside linkages.

[0165] Embodiment 28. The oligomeric compound of any of embodiments 1-23 or 25-27, wherein the internucleoside linkage motif of the modified oligonucleotide is selected from: 5′-soosssssssssooss-3′, 5′-sooosssssssssssooss-3′, 5′-sooosssssssssssooos-3′, 5′-sossssssssssssssoss-3′, 5′-ssoosssssssssssooss-3′, 5′-sooosssssssssooss-3′, 5′-sossssssssssssoss-3′, and 5′-sooooossssssssssoss-3′, wherein each “s” represents a phosphorothioate internucleoside linkage and each “o” represents a phosphodiester internucleoside linkage.

[0166] Embodiment 29. The oligomeric compound of any of embodiments 1-28, wherein the modified oligonucleotide comprises a modified nucleobase.

[0167] Embodiment 30. The oligomeric compound of embodiment 29, wherein the modified nucleobase is a 5-methylcytosine.

[0168] Embodiment 31. The oligomeric compound of any of embodiments 1-30, wherein the modified oligonucleotide comprises a deoxy region.

[0169] Embodiment 32. The oligomeric compound of embodiment 31, wherein each nucleoside of the deoxy region is a 2′-β-D-deoxynucleoside.

[0170] Embodiment 33. The oligomeric compound of embodiment 31 or embodiment 32, wherein the deoxy region consists of 6, 7, 8, 9, 10, or 6-10 linked nucleosides.

[0171] Embodiment 34. The oligomeric compound of any of embodiments 31-33, wherein each nucleoside immediately adjacent to the deoxy region comprises a modified sugar moiety.

[0172] Embodiment 35. The oligomeric compound of any of embodiments 31-34, wherein the deoxy region is flanked on the 5′-side by a 5′-region consisting of 1-6 linked 5′-region nucleosides and on the 3′-side by a 3′-region consisting of 1-6 linked 3′-region nucleosides; wherein at least one nucleoside of the 5′-region comprises a modified sugar moiety; and at least one nucleoside of the 3′-region comprises a modified sugar moiety.

[0173] Embodiment 36. The oligomeric compound of embodiment 35, wherein each nucleoside of the 5′-region comprises a modified sugar moiety.

[0174] Embodiment 37. The oligomeric compound of embodiment 35 or embodiment 36, wherein each nucleoside of the 3′-region comprises a modified sugar moiety.

[0175] Embodiment 38. The oligomeric compound of any of embodiments 1-37, wherein the modified oligonucleotide consists of 12-30, 12-22, 12-20,14-18, 14-20, 15-17, 15-25, 16-20, 18-22, or 18-20 linked nucleosides.

[0176] Embodiment 39. The oligomeric compound of any of embodiments 1-38, wherein the modified oligonucleotide consists of 17 linked nucleosides.

[0177] Embodiment 40. The oligomeric compound of any of embodiments 1-38, wherein the modified oligonucleotide consists of 18 linked nucleosides.

[0178] Embodiment 41. The oligomeric compound of any of embodiments 1-38, wherein the modified oligonucleotide consists of 20 linked nucleosides.

[0179] Embodiment 42. The oligomeric compound of any of embodiments 1-41, wherein the modified oligonucleotide is a pharmaceutically acceptable salt.

[0180] Embodiment 43. The oligomeric compound of embodiment 42, which is a pharmaceutically acceptable salt comprising one or more cations selected from sodium, potassium, calcium, and magnesium.

[0181] Embodiment 44. The oligomeric compound of any of embodiments 1-43, consisting of the modified oligonucleotide.

[0182] Embodiment 45. The oligomeric compound of any of embodiments 1-44, wherein the oligomeric compound comprises a conjugate group.

[0183] Embodiment 46. The oligomeric compound of embodiment 45, wherein the conjugate group comprises a conjugate moiety and a conjugate linker.

[0184] Embodiment 47. The oligomeric compound of embodiment 46, wherein the conjugate linker consists of a single bond.

[0185] Embodiment 48. The oligomeric compound of embodiment 46, wherein the conjugate linker is cleavable.

[0186] Embodiment 49. The oligomeric compound of embodiment 46, wherein the conjugate linker comprises 1-3 linker-nucleosides.

[0187] Embodiment 50. The oligomeric compound of embodiment 46, wherein the oligomeric compound does not comprise a linker-nucleoside.

[0188] Embodiment 51. The oligomeric compound of any of embodiments 45-50, wherein the conjugate group is attached to the modified oligonucleotide at the 5′-end of the modified oligonucleotide.

[0189] Embodiment 52. The oligomeric compound of any of embodiments 45-50, wherein the conjugate group is attached to the modified oligonucleotide at the 3′-end of the modified oligonucleotide.

[0190] Embodiment 53. The oligomeric compound of any of embodiments 1-52, comprising a terminal group.

[0191] Embodiment 54. The oligomeric compound of embodiment 53, wherein the terminal group is an abasic sugar moiety.

[0192] Embodiment 55. The oligomeric compound of any of embodiments 1-54, wherein the modified oligonucleotide is a single-stranded modified oligonucleotide.

[0193] Embodiment 56. The oligomeric compound of any of embodiments 1-55, wherein the oligomeric compound is an RNase H agent comprising the oligomeric compound.

[0194] Embodiment 57. An oligomeric compound comprising a modified oligonucleotide according to the following chemical notation:

(SEQ ID NO: 3619)
^{m}Cₑₛ Aₑₒ ^{m}Cₑₒ Aₑₒ Gₑₒ ^{m}Cₑₒ T_{ds} T_{ds} T_{ds} T_{ds} A_{ds} T_{ds} T_{ds} T_{ds} ^{m}C_{ds}
^{m}C_{ds} Aₑₒ Tₑₛ Aₑₛ ^{m}Cₑ,

wherein
[0195] A=an adenine,
[0196] ^{m}C=a 5-methylcytosine,
[0197] G=a guanine,
[0198] T=a thymine,
[0199] e=a 2′-O-methoxyethylribose modified sugar,
[0200] d=a 2′-deoxyribose sugar moiety,
[0201] s=a phosphorothioate internucleoside linkage, and
[0202] o=a phosphodiester internucleoside linkage.

[0203] Embodiment 58. An oligomeric compound comprising a modified oligonucleotide according to the following chemical notation:

(SEQ ID NO: 1502)
Gₑₛ ^{m}Cₑₒ Tₑₒ Tₑₒ Tₑₛ G_{ds} A_{ds} T_{ds} T_{ds} T_{ds} T_{ds} T_{ds} A_{ds} ^{m}C_{ds} ^{m}C_{ds}
Aₑₒ Gₑₒ Tₑₛ Tₑₛ Aₑ,

wherein
[0204] A=an adenine,
[0205] ^{m}C=a 5-methylcytosine,
[0206] G=a guanine,
[0207] T=a thymine,
[0208] e=a 2′-O-methoxyethylribose modified sugar,
[0209] d=a 2′-deoxyribose sugar moiety,
[0210] s=a phosphorothioate internucleoside linkage, and
[0211] o=a phosphodiester internucleoside linkage.

[0212] Embodiment 59. An oligomeric compound comprising a modified oligonucleotide according to the following chemical notation:

(SEQ ID NO: 3646)
Aₑₛ ^{m}Cₑₒ Aₑₒ Gₑₒ ^{m}Cₑₒ Tₑₒ T_{ds} T_{ds} T_{ds} A_{ds} T_{ds} T_{ds} T_{ds} ^{m}C_{ds} ^{m}C_{ds}
A_{ds} Tₑₒ Aₑₛ ^{m}Cₑₛ Aₑ,

wherein
[0213] A=an adenine,
[0214] ^{m}C=a 5-methylcytosine,
[0215] G=a guanine,
[0216] T=a thymine,
[0217] e=a 2′-O-methoxyethylribose modified sugar,
[0218] d=a 2′-deoxyribose sugar moiety,
[0219] s=a phosphorothioate internucleoside linkage, and
[0220] o=a phosphodiester internucleoside linkage.

[0221] Embodiment 60. The oligomeric compound of any of embodiments 57-59, wherein the modified oligonucleotide is a pharmaceutically acceptable salt.

[0222] Embodiment 61. The oligomeric compound of embodiment 60, which is a pharmaceutically acceptable salt comprising one or more cations selected from sodium, potassium, calcium, and magnesium.

[0223] Embodiment 62. The oligomeric compound of any of embodiments 57-61, wherein the oligomeric compound is a singled-stranded oligomeric compound.

[0224] Embodiment 63. A modified oligonucleotide according to the following chemical structure:

[chemical structure]

or a pharmaceutically acceptable salt thereof.

[0225] Embodiment 64. The modified oligonucleotide of embodiment 63, which is a pharmaceutically acceptable salt comprising one or more cations selected from sodium, potassium, calcium, and magnesium.

[0226] Embodiment 65. A modified oligonucleotide according to the following chemical structure:

[chemical structure]

[0227] Embodiment 66. A modified oligonucleotide according to the following chemical structure:

[chemical structure]

or a pharmaceutically acceptable salt thereof.

[0228] Embodiment 67. The modified oligonucleotide of embodiment 66, which is a pharmaceutically acceptable salt comprising one or more cations selected from sodium, potassium, calcium, and magnesium.

[0229] Embodiment 68. A modified oligonucleotide according to the following chemical structure:

[chemical structure]

[0230] Embodiment 69. A modified oligonucleotide according to the following chemical structure:

[chemical structure]

or a pharmaceutically acceptable salt thereof.

[0231] Embodiment 70. The modified oligonucleotide of embodiment 69, which is a pharmaceutically acceptable salt comprising one or more cations selected from sodium, potassium, calcium, and magnesium.

[0232] Embodiment 71. A modified oligonucleotide according to the following chemical structure:

[chemical structure]

[0233] Embodiment 72. A chirally enriched population of oligomeric compounds of any of embodiments 1-62 or modified oligonucleotides of any of embodiments 63-71, wherein the population is enriched for modified oligonucleotides comprising at least one particular phosphorothioate internucleoside linkage having a particular stereochemical configuration.

[0234] Embodiment 73. The chirally enriched population of embodiment 72, wherein the population is enriched for modified oligonucleotides comprising at least one particular phosphorothioate internucleoside linkage having the (Sp) configuration.

[0235] Embodiment 74. The chirally enriched population of embodiment 72, wherein the population is enriched for modified oligonucleotides comprising at least one particular phosphorothioate internucleoside linkage having the (Rp) configuration.

[0236] Embodiment 75. The chirally enriched population of embodiment 72, wherein the population is enriched for modified oligonucleotides having a particular, independently selected stereochemical configuration at each phosphorothioate internucleoside linkage.

[0237] Embodiment 76. The chirally enriched population of embodiment 72, wherein the population is enriched for modified oligonucleotides having the (Sp) configuration at each phosphorothioate internucleoside linkage.

[0238] Embodiment 77. The chirally enriched population of embodiment 72, wherein the population is enriched for modified oligonucleotides having the (Rp) configuration at each phosphorothioate internucleoside linkage.

[0239] Embodiment 78. The chirally enriched population of embodiment 72, wherein the population is enriched for modified oligonucleotides having the (Rp) configuration at one particular phosphorothioate internucleoside linkage and the (Sp) configuration at each of the remaining phosphorothioate internucleoside linkages.

[0240] Embodiment 79. The chirally enriched population of embodiment 72, wherein the population is enriched for modified oligonucleotides having at least 3 contiguous phosphorothioate internucleoside linkages in the Sp, Sp, and Rp configurations, in the 5′ to 3′ direction.

[0241] Embodiment 80. A population of oligomeric compounds of any of embodiments 1-62 or modified oligonucleotides of any of embodiments 63-71, wherein all of the phosphorothioate internucleoside linkages of the modified oligonucleotide are stereorandom.

[0242] Embodiment 81. An oligomeric duplex, comprising a first oligomeric compound and a second oligomeric compound comprising a second modified oligonucleotide, wherein the first oligomeric compound is an oligomeric compound of any of embodiments 1-62.

[0243] Embodiment 82. The oligomeric duplex of embodiment 81, wherein the second modified oligonucleotide consists of 12 to 30 linked nucleosides, and wherein the nucleobase sequence of the second modified oligonucleotide comprises a complementary region of at least 8 nucleobases that is at least 90% complementary to an equal length portion of the first modified oligonucleotide.

[0244] Embodiment 83. The oligomeric duplex of embodiment 81 or embodiment 82, wherein the modified oligonucleotide of the first oligomeric compound comprises a 5′-stabilized phosphate group.

[0245] Embodiment 84. The oligomeric duplex of embodiment 83, wherein the stabilized phosphate group comprises a cyclopropyl phosphonate or a vinyl phosphonate.

[0246] Embodiment 85. The oligomeric duplex of any of embodiments 81-84, wherein at least one nucleoside of the second modified oligonucleotide comprises a modified sugar moiety.

[0247] Embodiment 86. The oligomeric duplex of embodiment 85, wherein the modified sugar moiety of the second modified oligonucleotide comprises a bicyclic sugar moiety.

[0248] Embodiment 87. The oligomeric duplex of embodiment 86, wherein the bicyclic sugar moiety of the second modified oligonucleotide comprises a 2′-4′ bridge selected from —O—CH₂—; and —O—CH(CH₃)—.

[0249] Embodiment 88. The oligomeric duplex of embodiment 85, wherein the modified sugar moiety of the second modified oligonucleotide comprises a non-bicyclic modified sugar moiety.

[0250] Embodiment 89. The oligomeric duplex of embodiment 88, wherein the non-bicyclic modified sugar moiety of the second modified oligonucleotide is a 2′-MOE sugar moiety, a 2′-cEt sugar moiety, a 2′-F sugar moiety, or a 2′-OMe sugar moiety.

[0251] Embodiment 90. The oligomeric duplex of any of embodiments 81-89, wherein at least one internucleoside linkage of the second modified oligonucleotide is a modified internucleoside linkage.

[0252] Embodiment 91. The oligomeric duplex of embodiment 90, wherein at least one modified internucleoside linkage of the second modified oligonucleotide is a phosphorothioate internucleoside linkage.

[0253] Embodiment 92. The oligomeric duplex of any of embodiments 81-91, wherein at least one internucleoside linkage of the second modified oligonucleotide is a phosphodiester internucleoside linkage.

[0254] Embodiment 93. The oligomeric duplex of any of embodiments 81-92, wherein each internucleoside linkage of the second modified oligonucleotide is independently selected from a phosphodiester or a phosphorothioate internucleoside linkage.

[0255] Embodiment 94. The oligomeric duplex of any of embodiments 81-93, wherein the second modified oligonucleotide comprises at least one modified nucleobase.

[0256] Embodiment 95. The oligomeric duplex of embodiment 94, wherein the at least one modified nucleobase of the second modified oligonucleotide is 5-methylcytosine.

[0257] Embodiment 96. The oligomeric duplex of any of embodiments 81-95, wherein the second modified oligonucleotide comprises a conjugate group.

[0258] Embodiment 97. The oligomeric duplex of embodiment 96, wherein the conjugate group comprises a conjugate linker and a conjugate moiety.

[0259] Embodiment 98. The oligomeric duplex of embodiment 96 or embodiment 97, wherein the conjugate group is attached to the 5′-end of the second modified oligonucleotide.

[0260] Embodiment 99. The oligomeric duplex of embodiment 96 or embodiment 97, wherein the conjugate group is attached to the 3′-end of the second modified oligonucleotide.

[0261] Embodiment 100. The oligomeric duplex of any of embodiments 96-99, wherein the conjugate group comprises a lipid.

[0262] Embodiment 101. The oligomeric duplex of any of embodiments 81-100, wherein the second modified oligonucleotide comprises a terminal group.

[0263] Embodiment 102. The oligomeric duplex of embodiment 101, wherein the terminal group is an abasic sugar moiety.

[0264] Embodiment 103. The oligomeric duplex of any of embodiments 81-102, wherein the second modified oligonucleotide consists of 12 to 20, 12 to 25, 12 to 30, 13 to 20, 13 to 25, 13 to 30, 14 to 20, 14 to 25, 14 to 30, 15 to 20, 15 to 25, 15 to 30, 16 to 18, 16 to 20, 16 to 25, 16 to 30, 17 to 20, 17 to 25, 17 to 30, 18 to 20, 18 to 22, 18 to 25, 18 to 30, 19 to 20, 19 to 25, 19 to 30, 20 to 25, 20 to 30, 21 to 25, 21 to 30, 22 to 25, 22 to 30, 23 to 25, or 23 to 30 linked nucleosides.

[0265] Embodiment 104. An antisense agent comprising an antisense compound, wherein the antisense compound is an oligomeric compound of any of embodiments 1-62.

[0266] Embodiment 105. An antisense agent comprising an antisense compound, wherein the antisense compound is an oligomeric duplex of any of embodiments 81-103.

[0267] Embodiment 106. The antisense agent of embodiment 104 or embodiment 105, wherein the antisense agent is:
[0268] a) an RNase H agent capable of reducing the amount of HTT nucleic acid through the activation of RNase H; or
[0269] b) an RNAi agent capable of reducing the amount of HTT nucleic acid through the activation of RISC/Ago2.

[0270] Embodiment 107. A pharmaceutical composition comprising an oligomeric compound of any of embodiments 1-62, a modified oligonucleotide of any of embodiments 63-71, a population of any of embodiments 72-79, an oligomeric duplex of any of embodiments 81-103, or an antisense agent of any of embodiments 104-106; and a pharmaceutically acceptable carrier or diluent.

[0271] Embodiment 108. The pharmaceutical composition of embodiment 107, wherein the pharmaceutically acceptable diluent comprises phosphate buffered saline (PBS) or artificial cerebrospinal fluid (aCSF).

[0272] Embodiment 109. The pharmaceutical composition of embodiment 108, wherein the pharmaceutical composition consists essentially of the oligomeric compound of any of embodiments 1-62, the modified oligonucleotide of any of embodiments 63-71, the population of any of embodiments 72-79, the oligomeric duplex of any of embodiments 81-103, or the antisense agent of any of embodiments 104-106, and PBS.

[0273] Embodiment 110. The pharmaceutical composition of embodiment 108, wherein the pharmaceutical composition consists essentially of the oligomeric compound of any of embodiments 1-62, the modified oligonucleotide of any of embodiments 63-71, the population of any of embodiments 72-79, the oligomeric duplex of any of embodiments 81-103, or the antisense agent of any of embodiments 104-106, and aCSF.

[0274] Embodiment 111. A method comprising administering to a subject an oligomeric compound of any of embodiments 1-62, a modified oligonucleotide of any of embodiments 63-71, a population of any of embodiments 72-79, an oligomeric duplex of any of embodiments 81-103, an antisense agent of any of embodiments 104-106, or a pharmaceutical composition of any of embodiments 107-110.

[0275] Embodiment 112. A method of ameliorating or preventing a repeat expansion disease, comprising administering to a subject in need thereof a therapeutically effective amount of an oligomeric compound of any of embodiments 1-62, a modified oligonucleotide of any of embodiments 63-71, a population of any of embodiments 72-79, an oligomeric duplex of any of embodiments 81-103, an antisense agent of any of embodiments 104-106, or a pharmaceutical composition of any of embodiments 107-110.

[0276] Embodiment 113. The method of embodiment 112, wherein the repeat expansion disease is selected from myotonic dystrophy (DM1 and DM2), amyotrophic lateral sclerosis, frontotemporal dementia, Huntington's disease, a polyglutamine disorder, Fragile X syndrome, and a spinocerebellar ataxia.

[0277] Embodiment 114. The method of embodiment 112, wherein the repeat expansion disease is Huntington's disease.

[0278] Embodiment 115. The method of embodiment 112, wherein the repeat expansion disease is a spinocerebellar ataxia.

[0279] Embodiment 116. The method of any of embodiments 112-115, wherein at least one symptom or hallmark of the repeat expansion disease is ameliorated.

[0280] Embodiment 117. The method of embodiment 116, wherein the symptom or hallmark is selected from brain atrophy, reduced brain activity, reduced brain connectivity, muscle atrophy, muscle weakness, muscle cramping, difficulty swallowing, seizure, tremor, nerve degeneration, cardiac failure, impaired glucose tolerance, weight loss, osteoporosis, testicular atrophy, impaired global function, impaired motor function, impaired cognitive function, impaired daily function, impaired attention, impaired visuoperceptual processing, impaired working memory, impaired psychomotor speed, impaired verbal motor output, impaired degree of independence, impaired apathy, impaired learning ability, impaired mental concentration, impaired speech, depression, irritability, anger, impaired mobility, impaired self-care, pain, discomfort, anxiety, suicidal ideation, suicidal behavior, and a combination thereof.

[0281] Embodiment 118. The method of any of embodiments 116-117, wherein administering the oligomeric compound of any of embodiments 1-62, the modified oligonucleotide of any of embodiments 63-71, the population of any of embodiments 72-79, the oligomeric duplex of any of embodiments 81-103, the antisense agent of any of embodiments 104-106, or the pharmaceutical composition of any of embodiments 107-110 reduces or delays the onset or progression of brain atrophy, reduced brain activity, reduced brain connectivity, muscle atrophy, muscle weakness, muscle cramping, difficulty swallowing, seizure, tremor, nerve degeneration, cardiac failure, impaired glucose tolerance, weight loss, osteoporosis, testicular atrophy, impaired global function, impaired motor function, impaired cognitive function, impaired daily function, impaired attention, impaired visuoperceptual processing, impaired working memory, impaired psychomotor speed, impaired verbal motor output, impaired degree of independence, impaired apathy, impaired learning ability, impaired mental concentration, impaired speech, depression, irritability, anger, impaired mobility, impaired self-care, pain, discomfort, anxiety, suicidal ideation, or suicidal behavior.

[0282] Embodiment 119. The method of any of embodiments 111-118, comprising identifying the subject as having the repeat expansion disease or at risk for having the repeat expansion disease.

[0283] Embodiment 120. The method of any of embodiments 111-119, wherein the oligomeric compound of any of embodiments 1-62, the modified oligonucleotide of any of embodiments 63-71, the population of any of embodiments 72-79, the oligomeric duplex of any of embodiments 81-103, the antisense agent of any of embodiments 104-106, or the pharmaceutical composition of any of embodiments 107-110 is administered to the central nervous system or systemically.

[0284] Embodiment 121. The method of any of embodiments 111-119, wherein the oligomeric compound of any of embodiments 1-62, the modified oligonucleotide of any of embodiments 63-71, the population of any of embodiments 72-79, the oligomeric duplex of any of embodiments 81-103, the antisense agent of any of embodiments 104-106, or the pharmaceutical composition of any of embodiments 107-110 is administered intrathecally.

[0285] Embodiment 122. The method of any of embodiments 111-121, wherein the subject is a human.

[0286] Embodiment 123. A method of reducing expression of HTT in a cell comprising contacting the cell with an oligomeric compound of any of embodiments 1-62, a modified oligonucleotide of any of embodiments 63-71, a population of any of embodiments 72-79, an oligomeric duplex of any of embodiments 81-103, an antisense agent of any of embodiments 104-106, or a pharmaceutical composition of any of embodiments 107-110.

[0287] Embodiment 124. The method of embodiment 123, wherein the cell is from a brain tissue, optionally from the cortex, substantia nigra, striatum, midbrain, brainstem, or spinal cord.

[0288] Embodiment 125. The method of embodiment 123 or embodiment 124, wherein the cell is a human cell.

[0289] Embodiment 126. Use of an oligomeric compound of any of embodiments 1-62, a modified oligonucleotide of any of embodiments 63-71, a population of any of embodiments 72-79, an oligomeric duplex of any of embodiments 81-103, an antisense agent of any of embodiments 104-106, or a pharmaceutical composition of any of embodiments 107-110 for ameliorating or preventing a repeat expansion disease.

[0290] Embodiment 127. Use of an oligomeric compound of any of embodiments 1-62, a modified oligonucleotide of any of embodiments 63-71, a population of any of embodiments 72-79, an oligomeric duplex of any of embodiments 81-103, an antisense agent of any of embodiments 104-106, or a pharmaceutical composition of any of embodiments 107-110 in the manufacture of a medicament for ameliorating or preventing a repeat expansion disease.

[0291] Embodiment 128. The use of embodiment 126 or embodiment 127, wherein the repeat expansion disease is Huntington's disease.

### I. Certain Oligonucleotides

[0292] In certain embodiments, provided herein are oligomeric compounds comprising oligonucleotides, which consist of linked nucleosides. Oligonucleotides may be unmodified oligonucleotides (RNA or DNA) or may be modified oligonucleotides. Modified oligonucleotides comprise at least one modification relative to unmodified RNA or DNA. That is, modified oligonucleotides comprise at least one modified nucleoside (comprising a modified sugar moiety and/or a modified nucleobase) and/or at least one modified internucleoside linkage. Certain modified nucleosides and modified internucleoside linkages suitable for use in modified oligonucleotides are described below.

### A. Certain Modified Nucleosides

[0293] Modified nucleosides comprise a modified sugar moiety or a modified nucleobase or both a modified sugar moiety and a modified nucleobase. In certain embodiments, modified nucleosides comprising the following modified sugar moieties and/or the following modified nucleobases may be incorporated into modified oligonucleotides.

### 1. Certain Sugar Moieties

[0294] In certain embodiments, modified sugar moieties are non-bicyclic modified sugar moieties. In certain embodiments, modified sugar moieties are bicyclic or tricyclic sugar moieties. In certain embodiments, modified sugar moieties are sugar surrogates. Such sugar surrogates may comprise one or more substitutions corresponding to those of other types of modified sugar moieties.

[0295] In certain embodiments, modified sugar moieties are non-bicyclic modified furanosyl sugar moieties comprising one or more acyclic substituent, including, but not limited, to substituents at the 2′, 3′, 4′, and/or 5′ positions. In certain embodiments, the furanosyl sugar moiety is a ribosyl sugar moiety. In certain embodiments, one or more acyclic substituent of non-bicyclic modified sugar moieties is branched.

[0296] In certain embodiments, non-bicyclic modified sugar moieties comprise a substituent group at the 2′-position. Examples of substituent groups suitable for the 2′-position of modified sugar moieties include but are not limited to: —F, —OCH₃ (“OMe” or “O-methyl”), and —O(CH₂)₂OCH₃ (“MOE”). In certain embodiments, 2′-substituent groups are selected from among: halo, allyl, amino, azido, SH, CN, OCN, CF₃, OCF₃, O—C₁-C₁₀ alkoxy, O—C₁-C₁₀ substituted alkoxy, O—C₁-C₁₀ alkyl, O—C₁-C₁₀ substituted alkyl, S-alkyl, N(Rₘ)-alkyl, O-alkenyl, S-alkenyl, N(Rₘ)-alkenyl, O-alkynyl, S-alkynyl, N(Rₘ)-alkynyl, O-alkylenyl-O-alkyl, alkynyl, alkaryl, aralkyl, O-alkaryl, O-aralkyl, O(CH₂)₂SCH₃, O(CH₂)₂ON(Rₘ)(Rₙ) or OCH₂C(═O)—N(Rₘ)(Rₙ), where each Rₘ and Rₙ is, independently, H, an amino protecting group, or substituted or unsubstituted C₁-C₁₀ alkyl, —O(CH₂)₂ON(CH₃)₂(“DMAOE”), 2′-O(CH₂)₂O(CH₂)₂N(CH₃)₂ (“DMAEOE”), and the 2′-substituent groups described in Cook et al., U.S. Pat. No. 6,531,584; Cook et al., U.S. 5,859,221; and Cook et al., U.S. Pat. No. 6,005,087. Certain embodiments of these 2′-substituent groups can be further substituted with one or more substituent groups independently selected from among: hydroxyl, amino, alkoxy, carboxy, benzyl, phenyl, nitro (NO₂), thiol, thioalkoxy, thioalkyl, halogen, alkyl, aryl, alkenyl and alkynyl.

[0297] In certain embodiments, a 2′-substituted non-bicyclic modified nucleoside comprises a sugar moiety comprising a non-bridging 2′-substituent group selected from: F, NH₂, N₃, OCF₃, OCH₃, O(CH₂)₃NH₂, CH₂CH═CH₂, OCH₂CH═CH₂, OCH₂CH₂OCH₃, O(CH₂)₂SCH₃, O(CH₂)₂ON(Rₘ)(Rₙ), O(CH₂)₂O(CH₂)₂N(CH₃)₂, and N-substituted acetamide (OCH₂C(═O)—N(Rₘ)(Rₙ)), where each Rₘ and Rₙ is, independently, H, an amino protecting group, or substituted or unsubstituted C₁-C₁₀ alkyl.

[0298] In certain embodiments, a 2′-substituted nucleoside non-bicyclic modified nucleoside comprises a sugar moiety comprising a non-bridging 2′-substituent group selected from: F, OCF₃, OCH₃, OCH₂CH₂OCH₃, O(CH₂)₂SCH₃, O(CH₂)₂ON(CH₃)₂, O(CH₂)₂O(CH₂)₂N(CH₃)₂, and OCH₂C(═O)—N(H)CH₃ (“NMA”).

[0299] In certain embodiments, a 2′-substituted non-bicyclic modified nucleoside comprises a sugar moiety comprising a non-bridging 2′-substituent group selected from: F, OCH₃, and OCH₂CH₂OCH₃.

[0300] In certain embodiments, modified furanosyl sugar moieties and nucleosides incorporating such modified furanosyl sugar moieties are further defined by isomeric configuration. For example, a 2′-deoxyfuranosyl sugar moiety may be in seven isomeric configurations other than the naturally occurring β-D-deoxyribosyl configuration. Such modified sugar moieties are described in, e.g., WO 2019/157531, incorporated by reference herein. A 2′-modified sugar moiety has an additional stereocenter at the 2′-position relative to a 2′-deoxyfuranosyl sugar moiety; therefore, such sugar moieties have a total of sixteen possible isomeric configurations. 2′-modified sugar moieties described herein are in the β-D-ribosyl isomeric configuration unless otherwise specified.

[0301] In certain embodiments, non-bicyclic modified sugar moieties comprise a substituent group at the 4′-position. Examples of substituent groups suitable for the 4′-position of modified sugar moieties include but are not limited to alkoxy (e.g., methoxy), alkyl, and those described in Manoharan et al., WO 2015/106128.

[0302] In certain embodiments, non-bicyclic modified sugar moieties comprise a substituent group at the 3′-position. Examples of substituent groups suitable for the 3′-position of modified sugar moieties include but are not limited to alkoxy (e.g., methoxy), alkyl (e.g., methyl, ethyl).

[0303] In certain embodiments, non-bicyclic modified sugar moieties comprise a substituent group at the 5′-position. Examples of substituent groups suitable for the 5′-position of modified sugar moieties include but are not limited to vinyl, alkoxy (e.g., methoxy), alkyl (e.g., methyl (R or S), ethyl).

[0304] In certain embodiments, non-bicyclic modified sugar moieties comprise more than one non-bridging sugar substituent, for example, 2′-F-5′-methyl sugar moieties and the modified sugar moieties and modified nucleosides described in Migawa et al., WO 2008/101157 and Rajeev et al., US2013/0203836).

[0305] In naturally occurring nucleic acids, sugars are linked to one another 3′ to 5′. In certain embodiments, oligonucleotides include one or more nucleoside or sugar moiety linked at an alternative position, for example at the 2′ position or inverted 5′ to 3′. For example, where the linkage is at the 2′ position, the 2′-substituent groups may instead be at the 3′-position.

[0306] Certain modified sugar moieties comprise a substituent that bridges two atoms of the furanosyl ring to form a second ring, resulting in a bicyclic sugar moiety. In certain such embodiments, the bicyclic sugar moiety comprises a bridge between the 4′ and the 2′ furanose ring atoms. Examples of such 4′ to 2′ bridging sugar substituents include but are not limited to: 4′-CH₂-2′, 4′-(CH₂)₂-2′, 4′-(CH₂)₃-2′, 4′-CH₂—O-2′ (“LNA”), 4′-CH₂—S-2′, 4′-(CH₂)₂—O-2′ (“ENA”), 4′-CH(CH₃)—O-2′ (referred to as “constrained ethyl” or “cEt”), 4′-CH₂—O—CH₂-2′, 4′-CH₂—N(R)-2′, 4′-CH(CH₂OCH₃)—O-2′ (“constrained MOE” or “cMOE”) and analogs thereof (see, e.g., Seth et al., U.S. Pat. No. 7,399,845, Bhat et al., U.S. Pat. No. 7,569,686, Swayze et al., U.S. Pat. No. 7,741,457, and Swayze et al., U.S. Pat. No. 8,022,193), 4′-C(CH₃)(CH₃)—O-2′ and analogs thereof (see, e.g., Seth et al., U.S. Pat. No. 8,278,283), 4′-CH₂—N(OCH₃)-2′ and analogs thereof (see, e.g., Prakash et al., U.S. Pat. No. 8,278,425), 4′-CH₂—O—N(CH₃)-2′ (see, e.g., Allerson et al., U.S. Pat. No. 7,696,345 and Allerson et al., U.S. Pat. No. 8,124,745), 4′-CH₂—C(H)(CH₃)-2′ (see, e.g., Zhou, et al., J. Org. Chem., 2009, 74, 118-134), 4′-CH₂—C(═CH₂)-2′ and analogs thereof (see e.g., Seth et al., U.S. Pat. No. 8,278,426), 4′-C(RₐR_{b})—N(R)—O-2′, 4′-C(RₐR_{b})—O—N(R)-2′, 4′-CH₂—O—N(R)-2′, and 4′-CH₂—N(R)—O-2′, wherein each R, Rₐ, and R_{b} is, independently, H, a protecting group, or C₁-C₁₂ alkyl (see, e.g. Imanishi et al., U.S. Pat. No. 7,427,672).

[0307] In certain embodiments, such 4′ to 2′ bridges independently comprise from 1 to 4 linked groups independently selected from: —[C(Rₐ)(R_{b})]ₙ—, —[C(Rₐ)(R_{b})]ₙ—O—, —C(Rₐ)═C(R_{b})—, —C(Rₐ)═N—, —C(═NRₐ)—, —C(═O)—, —C(═S)—, —O—, —Si(Rₐ)₂—, —S(═O)ₓ—, and —N(Rₐ)—;
[0308] wherein:
[0309] x is 0, 1, or 2;
[0310] n is 1, 2, 3, or 4;
[0311] each Rₐ and R_{b} is, independently, H, a protecting group, hydroxyl, C₁-C₁₂ alkyl, substituted C₁-C₁₂ alkyl, C₂-C₁₂ alkenyl, substituted C₂-C₁₂ alkenyl, C₂-C₁₂ alkynyl, substituted C₂-C₁₂ alkynyl, C₅-C₂₀ aryl, substituted C₅-C₂₀ aryl, heterocycle radical, substituted heterocycle radical, heteroaryl, substituted heteroaryl, C₅-C₇ alicyclic radical, substituted C₅-C₇ alicyclic radical, halogen, OJ₁, NJ₁J₂, SJ₁, N₃, COOJ₁, acyl (C(═O)—H), substituted acyl, CN, sulfonyl (S(═O)₂-J₁), or sulfoxyl (S(═O)-J₁); and
[0312] each J₁ and J₂ is, independently, H, C₁-C₁₂ alkyl, substituted C₁-C₁₂ alkyl, C₂-C₁₂ alkenyl, substituted C₂-C₁₂ alkenyl, C₂-C₁₂ alkynyl, substituted C₂-C₁₂ alkynyl, C₅-C₂₀ aryl, substituted C₅-C₂₀ aryl, acyl (C(═O)—H), substituted acyl, a heterocycle radical, a substituted heterocycle radical, C₁-C₁₂ aminoalkyl, substituted C₁-C₁₂ aminoalkyl, or a protecting group.

[0313] Additional bicyclic sugar moieties are known in the art, see, for example: Freier et al., Nucleic Acids Research, 1997, 25(22), 4429-4443, Albaek et al., J. Org. Chem., 2006, 71, 7731-7740, Singh et al., Chem. Commun., 1998, 4, 455-456; Koshkin et al., Tetrahedron, 1998, 54, 3607-3630; Kumar et al., Bioorg. Med. Chem. Lett., 1998, 8, 2219-2222; Singh et al., J. Org. Chem., 1998, 63, 10035-10039; Srivastava et al., J. Am. Chem. Soc., 2007, 129, 8362-8379; Wengel et al., U.S. Pat. No. 7,053,207; Imanishi et al., U.S. Pat. No. 6,268,490; Imanishi et al. U.S. Pat. No. 6,770,748; Imanishi et al., U.S. RE44,779; Wengel et al., U.S. Pat. No. 6,794,499; Wengel et al., U.S. Pat. No. 6,670,461; Wengel et al., U.S. Pat. No. 7,034,133; Wengel et al., U.S. Pat. No. 8,080,644; Wengel et al., U.S. Pat. No. 8,034,909; Wengel et al., U.S. Pat. No. 8,153,365; Wengel et al., U.S. Pat. No. 7,572,582; and Ramasamy et al., U.S. Pat. No. 6,525,191; Torsten et al., WO 2004/106356; Wengel et al., WO 1999/014226; Seth et al., WO 2007/134181; Seth et al., U.S. Pat. No. 7,547,684; Seth et al., U.S. Pat. No. 7,666,854; Seth et al., U.S. Pat. No. 8,088,746; Seth et al., U.S. Pat. No. 7,750,131; Seth et al., U.S. Pat. No. 8,030,467; Seth et al., U.S. Pat. No. 8,268,980; Seth et al., U.S. Pat. No. 8,546,556; Seth et al., U.S. Pat. No. 8,530,640; Migawa et al., U.S. Pat. No. 9,012,421; Seth et al., U.S. Pat. No. 8,501,805; and U.S. Patent Publication Nos. Allerson et al., US2008/0039618 and Migawa et al., US2015/0191727.

[0314] In certain embodiments, bicyclic sugar moieties and nucleosides incorporating such bicyclic sugar moieties are further defined by isomeric configuration. For example, an LNA nucleoside (described herein) may be in the α-L configuration or in the β-D configuration.

[chemical structure]

α-L-methyleneoxy (4′-CH₂—O—2′) or α-L-LNA bicyclic nucleosides have been incorporated into oligonucleotides that showed antisense activity (Frieden et al., Nucleic Acids Research, 2003, 21, 6365-6372). Herein, general descriptions of bicyclic nucleosides include both isomeric configurations. When the positions of specific bicyclic nucleosides (e.g., LNA or cEt) are identified in exemplified embodiments herein, they are in the β-D configuration, unless otherwise specified.

[0315] In certain embodiments, modified sugar moieties comprise one or more non-bridging sugar substituent and one or more bridging sugar substituent (e.g., 5′-substituted and 4′-2′ bridged sugars).

[0316] In certain embodiments, modified sugar moieties are sugar surrogates. In certain such embodiments, the oxygen atom of the sugar moiety is replaced, e.g., with a sulfur, carbon or nitrogen atom. In certain such embodiments, such modified sugar moieties also comprise bridging and/or non-bridging substituents as described herein. For example, certain sugar surrogates comprise a 4′-sulfur atom and a substitution at the 2′-position (see, e.g., Bhat et al., U.S. Pat. No. 7,875,733 and Bhat et al., U.S. Pat. No. 7,939,677) and/or the 5′ position.

[0317] In certain embodiments, sugar surrogates comprise rings having other than 5 atoms. For example, in certain embodiments, a sugar surrogate comprises a six-membered tetrahydropyran (“THP”). Such tetrahydropyrans may be further modified or substituted. Nucleosides comprising such modified tetrahydropyrans include but are not limited to hexitol nucleic acid (“HNA”), anitol nucleic acid (“ANA”), manitol nucleic acid (“MNA”) (see, e.g., Leumann, CJ. Bioorg. & Med. Chem. 2002, 10, 841-854), fluoro HNA:

[chemical structure]

(“F-HNA”, see e.g. Swayze et al., U.S. Pat. No. 8,088,904; Swayze et al., U.S. Pat. No. 8,440,803; Swayze et al., U.S. Pat. No. 8,796,437; and Swayze et al., U.S. Pat. No. 9,005,906; F-HNA can also be referred to as a F-THP or 3′-fluoro tetrahydropyran), and nucleosides comprising additional modified THP compounds having the formula:

[chemical structure]

wherein, independently, for each of said modified THP nucleoside:
[0318] Bx is a nucleobase moiety;
[0319] T₃ and T₄ are each, independently, an internucleoside linking group linking the modified THP nucleoside to the remainder of an oligonucleotide or one of T₃ and T₄ is an internucleoside linking group linking the modified THP nucleoside to the remainder of an oligonucleotide and the other of T₃ and T₄ is H, a hydroxyl protecting group, a linked conjugate group, or a 5′ or 3′-terminal group; q₁, q₂, q₃, q₄, q₅, q₆ and q₇ are each, independently, H, C₁-C₆ alkyl, substituted C₁-C₆ alkyl, C₂-C₆ alkenyl, substituted C₂-C₆ alkenyl, C₂-C₆ alkynyl, or substituted C₂-C₆ alkynyl; and
[0320] each of R₁ and R₂ is independently selected from among: hydrogen, halogen, substituted or unsubstituted alkoxy, NJ₁J₂, SJ₁, N₃, OC(═X)J₁, OC(═X)NJ₁J₂, NJ₃C(═X)NJ₁J₂, and CN, wherein X is O, S or NJ₁, and each J₁, J₂, and J₃ is, independently, H or C₁-C₆ alkyl.

[0321] In certain embodiments, modified THP nucleosides are provided wherein q₁, q₂, q₃, q₄, q₅, q₆ and q₇ are each H. In certain embodiments, at least one of q₁, q₂, q₃, q₄, q₅, q₆ and q₇ is other than H. In certain embodiments, at least one of q₁, q₂, q₃, q₄, q₅, q₆ and q₇ is methyl. In certain embodiments, modified THP nucleosides are provided wherein one of R₁ and R₂ is F. In certain embodiments, R₁ is F and R₂ is H, in certain embodiments, R₁ is methoxy and R₂ is H, and in certain embodiments, R₁ is methoxyethoxy and R₂ is H.

[0322] In certain embodiments, sugar surrogates comprise rings having more than 5 atoms and more than one heteroatom. For example, nucleosides comprising morpholino sugar moieties and their use in oligonucleotides have been reported (see, e.g., Braasch et al., Biochemistry, 2002, 41, 4503-4510 and Summerton et al., U.S. Pat. No. 5,698,685; Summerton et al., U.S. Pat. No. 5,166,315; Summerton et al., U.S. Pat. No. 5,185,444; and Summerton et al., U.S. Pat. No. 5,034,506). As used here, the term “morpholino” means a sugar surrogate having the following structure:

[chemical structure]

[0323] In certain embodiments, morpholinos may be modified, for example by adding or altering various substituent groups from the above morpholino structure. Such sugar surrogates are referred to herein as “modified morpholinos.”

[0324] In certain embodiments, sugar surrogates comprise acyclic moieties. Examples of nucleosides and oligonucleotides comprising such acyclic sugar surrogates include but are not limited to: peptide nucleic acid (“PNA”), acyclic butyl nucleic acid (see, e.g., Kumar et al., Org. Biomol. Chem., 2013, 11, 5853-5865), and nucleosides and oligonucleotides described in Manoharan et al., WO2011/133876. In certain embodiments, sugar surrogates comprise acyclic moieties. Examples of nucleosides and oligonucleotides comprising such acyclic sugar surrogates include, but are not limited to: peptide nucleic acid (“PNA”), acyclic butyl nucleic acid (see, e.g., Kumar et al., Org. Biomol. Chem., 2013, 11, 5853-5865), and nucleosides and oligonucleotides described in Manoharan et al., US2013/130378. Representative U.S. patents that teach the preparation of PNA compounds include, but are not limited to, U.S. Pat. Nos. 5,539,082; 5,714,331; and 5,719,262. Additional PNA compounds suitable for use in the oligonucleotides of the invention are described in, for example, in Nielsen et al., Science, 1991, 254, 1497-1500.

[0325] In certain embodiments, sugar surrogates are the “unlocked” sugar structure of UNA (unlocked nucleic acid) nucleosides. UNA is an unlocked acyclic nucleic acid, wherein any of the bonds of the sugar has been removed, forming an unlocked sugar surrogate. Representative U.S. publications that teach the preparation of UNA include, but are not limited to, U.S. Pat. No. 8,314,227; and US Patent Publication Nos. 2013/0096289; 2013/0011922; and 2011/0313020, the entire contents of each of which are hereby incorporated herein by reference.

[0326] In certain embodiments, sugar surrogates are the glycerol as found in GNA (glycol nucleic acid) nucleosides as depicted below:

### (S)-GNA

[chemical structure]

where Bx represents any nucleobase.

[0328] Many other bicyclic and tricyclic sugar and sugar surrogate ring systems are known in the art that can be used in modified nucleosides.

### 2. Certain Modified Nucleobases

[0329] In certain embodiments, modified oligonucleotides comprise one or more nucleosides comprising an unmodified nucleobase. In certain embodiments, modified oligonucleotides comprise one or more nucleosides comprising a modified nucleobase. In certain embodiments, modified oligonucleotides comprise one or more nucleosides that does not comprise a nucleobase, referred to as an abasic nucleoside. In certain embodiments, modified oligonucleotides comprise one or more inosine nucleosides (i.e., nucleosides comprising a hypoxanthine nucleobase).

[0330] In certain embodiments, modified nucleobases are selected from: 5-substituted pyrimidines, 6-azapyrimidines, alkyl or alkynyl substituted pyrimidines, alkyl substituted purines, and N-2, N-6 and O-6 substituted purines. In certain embodiments, modified nucleobases are selected from: 2-aminopropyladenine, 5-hydroxymethylcytosine, xanthine, hypoxanthine, 2-aminoadenine, 6-N-methylguanine, 6-N-methyladenine, 2-propyladenine, 2-thiouracil, 2-thiothymine and 2-thiocytosine, 5-propynyl (—C═C—CH₃) uracil, 5-propynylcytosine, 6-azouracil, 6-azocytosine, 6-azothymine, 5-ribosyluracil (pseudouracil), 4-thiouracil, 8-halo, 8-amino, 8-thiol, 8-thioalkyl, 8-hydroxyl, 8-aza and other 8-substituted purines, 5-halo, particularly 5-bromo, 5-trifluoromethyl, 5-halouracil, and 5-halocytosine, 7-methylguanine, 7-methyladenine, 2-F-adenine, 2-aminoadenine, 7-deazaguanine, 7-deazaadenine, 3-deazaguanine, 3-deazaadenine, 6-N-benzoyladenine, 2-N-isobutyrylguanine, 4-N-benzoylcytosine, 4-N-benzoyluracil, 5-methyl 4-N-benzoylcytosine, 5-methyl 4-N-benzoyluracil, universal bases, hydrophobic bases, promiscuous bases, size-expanded bases, and fluorinated bases. Further modified nucleobases include tricyclic pyrimidines, such as 1,3-diazaphenoxazine-2-one, 1,3-diazaphenothiazine-2-one and 9-(2-aminoethoxy)-1,3-diazaphenoxazine-2-one (G-clamp). Modified nucleobases may also include those in which the purine or pyrimidine base is replaced with other heterocycles, for example 7-deaza-adenine, 7-deazaguanosine, 2-aminopyridine and 2-pyridone. Further nucleobases include those disclosed in Merigan et al., U.S. Pat. No. 3,687,808, those disclosed in The Concise Encyclopedia Of Polymer Science And Engineering, Kroschwitz, J. I., Ed., John Wiley & Sons, 1990, 858-859; Englisch et al., Angewandte Chemie, International Edition, 1991, 30, 613; Sanghvi, Y. S., Chapter 15, Antisense Research and Applications, Crooke, S. T. and Lebleu, B., Eds., CRC Press, 1993, 273-288; and those disclosed in Chapters 6 and 15, Antisense Drug Technology, Crooke S. T., Ed., CRC Press, 2008, 163-166 and 442-443.

[0331] Publications that teach the preparation of certain of the above noted modified nucleobases as well as other modified nucleobases include without limitation, Manoharan et al., US2003/0158403; Manoharan et al., US2003/0175906; Dinh et al., U.S. Pat. No. 4,845,205; Spielvogel et al., U.S. Pat. No. 5,130,302; Rogers et al., U.S. Pat. No. 5,134,066; Bischofberger et al., U.S. Pat. No. 5,175,273; Urdea et al., U.S. Pat. No. 5,367,066; Benner et al., U.S. Pat. No. 5,432,272; Matteucci et al., U.S. Pat. No. 5,434,257; Gmeiner et al., U.S. Pat. No. 5,457,187; Cook et al., U.S. Pat. No. 5,459,255; Froehler et al., U.S. Pat. No. 5,484,908; Matteucci et al., U.S. Pat. No. 5,502,177; Hawkins et al., U.S. Pat. No. 5,525,711; Haralambidis et al., U.S. Pat. No. 5,552,540; Cook et al., U.S. Pat. No. 5,587,469; Froehler et al., U.S. Pat. No. 5,594,121; Switzer et al., U.S. Pat. No. 5,596,091; Cook et al., U.S. Pat. No. 5,614,617; Froehler et al., U.S. Pat. No. 5,645,985; Cook et al., U.S. Pat. No. 5,681,941; Cook et al., U.S. Pat. No. 5,811,534; Cook et al., U.S. Pat. No. 5,750,692; Cook et al., U.S. Pat. No. 5,948,903; Cook et al., U.S. Pat. No. 5,587,470; Cook et al., U.S. Pat. No. 5,457,191; Matteucci et al., U.S. Pat. No. 5,763,588; Froehler et al., U.S. Pat. No. 5,830,653; Cook et al., U.S. Pat. No. 5,808,027; Cook et al., 6,166,199; and Matteucci et al., U.S. Pat. No. 6,005,096.

### 3. Certain Modified Internucleoside Linkages

[0332] The naturally occurring internucleoside linkage of RNA and DNA is a 3′ to 5′ phosphodiester linkage. In certain embodiments, nucleosides of modified oligonucleotides may be linked together using any internucleoside linkage. The two main classes of internucleoside linking groups are defined by the presence or absence of a phosphorus atom. Representative phosphorus-containing internucleoside linkages include but are not limited to phosphates, which contain a phosphodiester bond (“P═O”) (also referred to as unmodified or naturally occurring linkages), phosphotriesters, methylphosphonates, phosphoramidates, and phosphorothioates (“P═S”), and phosphorodithioates (“HS—P═S”). Representative non-phosphorus containing internucleoside linking groups include but are not limited to methylenemethylimino (—CH₂—N(CH₃)—O—CH₂—), thiodiester, thionocarbamate (—O—C(═O)(NH)—S—); siloxane (—O—SiH₂—O—); and N,N′-dimethylhydrazine (—CH₂—N(CH₃)—N(CH₃)—). Modified internucleoside linkages, compared to naturally occurring phosphate linkages, can be used to alter, typically increase, nuclease resistance of the oligonucleotide. In certain embodiments, internucleoside linkages having a chiral atom can be prepared as a racemic mixture, or as separate enantiomers. Methods of preparation of phosphorous-containing and non-phosphorous-containing internucleoside linkages are well known to those skilled in the art.

[0333] In certain embodiments, a modified internucleoside linkage is any of those described in WO/2021/030778, incorporated by reference herein. In certain embodiments, a modified internucleoside linkage comprises the formula:

[chemical structure]

wherein independently for each internucleoside linking group of the modified oligonucleotide:
[0334] X is selected from O or S;
[0335] R₁ is selected from H, C₁-C₆ alkyl, and substituted C₁-C₆ alkyl; and
[0336] T is selected from SO₂R₂, C(═O)R₃, and P(═O)R₄R₅, wherein:
[0337] R₂ is selected from an aryl, a substituted aryl, a heterocycle, a substituted heterocycle, an aromatic heterocycle, a substituted aromatic heterocycle, a diazole, a substituted diazole, a C₁-C₆ alkoxy, C₁-C₆ alkyl, C₁-C₆ alkenyl, C₁-C₆ alkynyl, substituted C₁-C₆ alkyl, substituted C₁-C₆ alkenyl substituted C₁-C₆ alkynyl, and a conjugate group;
[0338] R₃ is selected from an aryl, a substituted aryl, CH₃, N(CH₃)₂, OCH₃ and a conjugate group;
[0339] R₄ is selected from OCH₃, OH, C₁-C₆ alkyl, substituted C₁-C₆ alkyl and a conjugate group; and
[0340] R₅ is selected from OCH₃, OH, C₁-C₆ alkyl, and substituted C₁-C₆ alkyl.

[0341] In certain embodiments, a modified internucleoside linkage comprises a mesyl phosphoramidate linking group having a formula:

[chemical structure]

[0342] In certain embodiments, a mesyl phosphoramidate internucleoside linkage may comprise a chiral center. In certain embodiments, modified oligonucleotides comprising (Rp) and/or (Sp) mesyl phosphoramidates comprise one or more of the following formulas, respectively, wherein “B” indicates a nucleobase:

[chemical structure]

[0343] Representative internucleoside linkages having a chiral center include but are not limited to alkylphosphonates and phosphorothioates. Modified oligonucleotides comprising internucleoside linkages having a chiral center can be prepared as populations of modified oligonucleotides comprising stereorandom internucleoside linkages, or as populations of modified oligonucleotides comprising phosphorothioate linkages in particular stereochemical configurations. In certain embodiments, populations of modified oligonucleotides comprise phosphorothioate internucleoside linkages wherein all of the phosphorothioate internucleoside linkages are stereorandom. Such modified oligonucleotides can be generated using synthetic methods that result in random selection of the stereochemical configuration of each phosphorothioate linkage. Nonetheless, as is well understood by those of skill in the art, each individual phosphorothioate of each individual oligonucleotide molecule has a defined stereoconfiguration. In certain embodiments, populations of modified oligonucleotides are enriched for modified oligonucleotides comprising one or more particular phosphorothioate internucleoside linkages in a particular, independently selected stereochemical configuration. In certain embodiments, the particular configuration of the particular phosphorothioate linkage is present in at least 65% of the molecules in the population. In certain embodiments, the particular configuration of the particular phosphorothioate linkage is present in at least 70% of the molecules in the population. In certain embodiments, the particular configuration of the particular phosphorothioate linkage is present in at least 80% of the molecules in the population. In certain embodiments, the particular configuration of the particular phosphorothioate linkage is present in at least 90% of the molecules in the population. In certain embodiments, the particular configuration of the particular phosphorothioate linkage is present in at least 99% of the molecules in the population. Such chirally enriched populations of modified oligonucleotides can be generated using synthetic methods known in the art, e.g., methods described in Oka et al., JACS 125, 8307 (2003), Wan et al. Nuc. Acid. Res. 42, 13456 (2014), and WO 2017/015555. In certain embodiments, a population of modified oligonucleotides is enriched for modified oligonucleotides having at least one indicated phosphorothioate in the (Sp) configuration. In certain embodiments, a population of modified oligonucleotides is enriched for modified oligonucleotides having at least one phosphorothioate in the (Rp) configuration. In certain embodiments, modified oligonucleotides comprising (Rp) and/or (Sp) phosphorothioates comprise one or more of the following formulas, respectively, wherein “B” indicates a nucleobase:

[chemical structure]

[0344] Unless otherwise indicated, chiral internucleoside linkages of modified oligonucleotides described herein can be stereorandom or in a particular stereochemical configuration.

[0345] Neutral internucleoside linkages include, without limitation, phosphotriesters, methylphosphonates, MMI (3′-CH₂—N(CH₃)—O—5′), amide-3 (3′-CH₂—C(═O)—N(H)-5′), amide-4 (3′-CH₂—N(H)—C(═O)-5′), formacetal (3′-O—CH₂—O-5′), methoxypropyl, and thioformacetal (3′-S—CH₂—O—5′). Further neutral internucleoside linkages include nonionic linkages comprising siloxane (dialkylsiloxane), carboxylate ester, carboxamide, sulfide, sulfonate ester and amides (See for example: Carbohydrate Modifications in Antisense Research; Y. S. Sanghvi and P. D. Cook, Eds., ACS Symposium Series 580; Chapters 3 and 4, 40-65). Further neutral internucleoside linkages include nonionic linkages comprising mixed N, O, S and CH₂ component parts.

[0346] In certain embodiments, modified oligonucleotides comprise one or more inverted nucleoside, as shown below:

[chemical structure]

wherein each Bx independently represents any nucleobase.

[0347] In certain embodiments, an inverted nucleoside is terminal (i.e., the last nucleoside on one end of an oligonucleotide) and so only one internucleoside linkage depicted above will be present. In certain such embodiments, additional features (such as a conjugate group) may be attached to the inverted nucleoside. Such terminal inverted nucleosides can be attached to either or both ends of an oligonucleotide.

[0348] In certain embodiments, such groups lack a nucleobase and are referred to herein as inverted sugar moieties. In certain embodiments, an inverted sugar moiety is terminal (i.e., attached to the last nucleoside on one end of an oligonucleotide) and so only one internucleoside linkage above will be present. In certain such embodiments, additional features (such as a conjugate group) may be attached to the inverted sugar moiety. Such terminal inverted sugar moieties can be attached to either or both ends of an oligonucleotide.

[0349] In certain embodiments, nucleic acids can be linked 2′ to 5′ rather than the standard 3′ to 5′ linkage. Such a linkage is illustrated below.

[chemical structure]

wherein each Bx represents any nucleobase.

### B. Certain Motifs

[0350] In certain embodiments, modified oligonucleotides comprise one or more modified nucleosides comprising a modified sugar moiety. In certain embodiments, modified oligonucleotides comprise one or more modified nucleosides comprising a modified nucleobase. In certain embodiments, modified oligonucleotides comprise one or more modified internucleoside linkage. In such embodiments, the modified, unmodified, and differently modified sugar moieties, nucleobases, and/or internucleoside linkages of a modified oligonucleotide define a pattern or motif. In certain embodiments, the patterns of sugar moieties, nucleobases, and internucleoside linkages are each independent of one another. Thus, a modified oligonucleotide may be described by its sugar motif, nucleobase motif and/or internucleoside linkage motif (as used herein, nucleobase motif describes the modifications to the nucleobases independent of the sequence of nucleobases).

### 1. Certain Sugar Motifs

[0351] In certain embodiments, oligonucleotides comprise one or more type of modified sugar and/or unmodified sugar moiety arranged along the oligonucleotide or region thereof in a defined pattern or sugar motif. In certain instances, such sugar motifs include but are not limited to any of the sugar modifications discussed herein.

[0352] In certain embodiments, modified oligonucleotides comprise or consist of a region having a gapmer motif, which is defined by two external regions or “wings” and a central or internal region or “gap.” The three regions of a gapmer motif (the 5′-wing, the gap, and the 3′-wing) form a contiguous sequence of nucleosides wherein at least some of the sugar moieties of the nucleosides of each of the wings differ from at least some of the sugar moieties of the nucleosides of the gap. Specifically, at least the sugar moieties of the nucleosides of each wing that are closest to the gap (the 3′-most nucleoside of the 5′-wing and the 5′-most nucleoside of the 3′-wing) differ from the sugar moiety of the neighboring gap nucleosides, thus defining the boundary between the wings and the gap (i.e., the wing/gap junction). In certain embodiments, the sugar moieties within the gap are the same as one another. In certain embodiments, the gap includes one or more nucleoside having a sugar moiety that differs from the sugar moiety of one or more other nucleosides of the gap. In certain embodiments, the sugar motifs of the two wings are the same as one another (symmetric gapmer). In certain embodiments, the sugar motif of the 5′-wing differs from the sugar motif of the 3′-wing (asymmetric gapmer).

[0353] In certain embodiments, the wings of a gapmer comprise 1-6 nucleosides. In certain embodiments, each nucleoside of each wing of a gapmer is a modified nucleoside. In certain embodiments, at least one nucleoside of each wing of a gapmer is a modified nucleoside. In certain embodiments, at least two nucleosides of each wing of a gapmer are modified nucleosides. In certain embodiments, at least three nucleosides of each wing of a gapmer are modified nucleosides. In certain embodiments, at least four nucleosides of each wing of a gapmer are modified nucleosides. In certain embodiments, at least five nucleosides of each wing of a gapmer comprises a modified sugar moiety.

[0354] In certain embodiments, the gap of a gapmer comprises 7-12 nucleosides. In certain embodiments, each nucleoside of the gap of a gapmer comprises a 2′-β-D-deoxyribosyl sugar moiety. In certain embodiments, at least one nucleoside of the gap of a gapmer comprises a modified sugar moiety.

[0355] In certain embodiments, the gapmer is a deoxy gapmer. In certain embodiments, the nucleosides on the gap side of each wing/gap junction comprise 2′-β-D-deoxyribosyl sugar moieties and the nucleosides on the wing sides of each wing/gap junction comprise modified sugar moieties. In certain embodiments, each nucleoside of the gap comprise 2′-β-D-deoxyribosyl sugar moieties. In certain embodiments, each nucleoside of each wing of a gapmer comprises a modified sugar moiety. In certain embodiments, at least one nucleoside of the gap of a gapmer comprises a modified sugar moiety. In certain embodiments, at least one nucleoside of the gap of a gapmer comprises a 2′-OMe or a 2′-cEt sugar moiety.

[0356] In certain embodiments, modified oligonucleotides comprise or consist of a region having a fully modified sugar motif. In such embodiments, each nucleoside of the fully modified region of the modified oligonucleotide comprises a modified sugar moiety. In certain embodiments, each nucleoside of the entire modified oligonucleotide comprises a modified sugar moiety. In certain embodiments, modified oligonucleotides comprise or consist of a region having a fully modified sugar motif, wherein each nucleoside within the fully modified region comprises the same modified sugar moiety, referred to herein as a uniformly modified sugar motif. In certain embodiments, a fully modified oligonucleotide is a uniformly modified oligonucleotide. In certain embodiments, each nucleoside of a uniformly modified comprises the same 2′-modification.

[0357] Herein, the lengths (number of nucleosides) of the three regions of a gapmer may be provided using the notation [# of nucleosides in the 5′-wing]−[# of nucleosides in the gap]−[# of nucleosides in the 3′-wing]. Thus, a 5-10-5 gapmer consists of 5 linked nucleosides in each wing and 10 linked nucleosides in the gap. Where such nomenclature is followed by a specific modification, that modification is the modification in each sugar moiety of each wing and the gap nucleosides comprise unmodified deoxynucleosides sugars. Thus, a 5-10-5 MOE gapmer consists of 5 linked MOE modified nucleosides in the 5′-wing, 10 linked deoxynucleosides in the gap, and 5 linked MOE nucleosides in the 3′-wing.

[0358] In certain embodiments, modified oligonucleotides are 5-10-5 MOE gapmers. In certain embodiments, modified oligonucleotides are 3-10-3 BNA gapmers. In certain embodiments, modified oligonucleotides are 3-10-3 cEt gapmers. In certain embodiments, modified oligonucleotides are 3-10-3 LNA gapmers. In certain embodiments, modified oligonucleotides are 5-8-5 MOE gapmers. In certain embodiments, modified oligonucleotides are 6-10-4 MOE gapmers.

[0359] A mixed wing gapmer has at least two different modified sugars in the 5′ and/or 3′ wing. In certain embodiments, modified oligonucleotides are 4-8-5 mixed wing gapmers which has at least two different sugar moieties in the 5′- and/or the 3′-wing. In certain embodiments, the at least two different sugar moieties are selected from 2′-MOE and 2′-cEt sugar moieties.

[0360] In certain embodiments, modified oligonucleotides have a sugar motif selected from the following: 5′-eekkddddddddkkeee-3′, 5′-ekekddddddddkekee-3′, 5′-eeeeeddddddddddeeeee-3′, 5′-eeeeddddddddkkeee-3′, 5′-eeeeeddddddddeeeee-3′, and 5′-eeeeeeddddddddddeeee-3′, wherein each “d” represents a 2′-β-D-deoxyribosyl sugar moiety, each “e” represents a 2′-MOE sugar moiety, and each “k” represents a cEt sugar moiety.

### 2. Certain Nucleobase Motifs

[0361] In certain embodiments, oligonucleotides comprise modified and/or unmodified nucleobases arranged along the oligonucleotide or region thereof in a defined pattern or motif. In certain embodiments, each nucleobase is modified. In certain embodiments, none of the nucleobases are modified. In certain embodiments, each purine or each pyrimidine is modified. In certain embodiments, each adenine is modified. In certain embodiments, each guanine is modified. In certain embodiments, each thymine is modified. In certain embodiments, each uracil is modified. In certain embodiments, each cytosine is modified. In certain embodiments, some or all of the cytosine nucleobases in a modified oligonucleotide are 5-methylcytosines. In certain embodiments, all of the cytosine nucleobases are 5-methylcytosines and all of the other nucleobases of the modified oligonucleotide are unmodified nucleobases.

[0362] In certain embodiments, modified oligonucleotides comprise a block of modified nucleobases. In certain such embodiments, the block is at the 3′-end of the oligonucleotide. In certain embodiments the block is within 3 nucleosides of the 3′-end of the oligonucleotide. In certain embodiments, the block is at the 5′-end of the oligonucleotide. In certain embodiments the block is within 3 nucleosides of the 5′-end of the oligonucleotide.

[0363] In certain embodiments, oligonucleotides having a gapmer motif comprise a nucleoside comprising a modified nucleobase. In certain such embodiments, one nucleoside comprising a modified nucleobase is in the central gap of an oligonucleotide having a gapmer motif. In certain such embodiments, the sugar moiety of said nucleoside is a 2′-β-D-deoxyribosyl sugar moiety. In certain embodiments, the modified nucleobase is selected from: a 2-thiopyrimidine and a 5-propynepyrimidine.

### 3. Certain Internucleoside Linkage Motifs

[0364] In certain embodiments, oligonucleotides comprise modified and/or unmodified internucleoside linkages arranged along the oligonucleotide or region thereof in a defined pattern or motif. In certain embodiments, each internucleoside linking group is a phosphodiester internucleoside linkage (P═O). In certain embodiments, each internucleoside linking group of a modified oligonucleotide is a phosphorothioate internucleoside linkage (P═S). In certain embodiments, each internucleoside linkage of a modified oligonucleotide is independently selected from a phosphorothioate internucleoside linkage and phosphodiester internucleoside linkage. In certain embodiments, each phosphorothioate internucleoside linkage is independently selected from a stereorandom phosphorothioate a (Sp) phosphorothioate, and a (Rp) phosphorothioate.

[0365] In certain embodiments, the sugar motif of a modified oligonucleotide is a gapmer and the internucleoside linkages within the gap are all modified. In certain embodiments, some or all of the internucleoside linkages in the wings are unmodified phosphodiester internucleoside linkages. In certain embodiments, the terminal internucleoside linkages are modified. In certain embodiments, the sugar motif of a modified oligonucleotide is a gapmer, and the internucleoside linkage motif comprises at least one phosphodiester internucleoside linkage in at least one wing, wherein the at least one phosphodiester linkage is not a terminal internucleoside linkage, and the remaining internucleoside linkages are phosphorothioate internucleoside linkages. In certain such embodiments, all of the phosphorothioate linkages are stereorandom. In certain embodiments, all of the phosphorothioate linkages in the wings are (Sp) phosphorothioates, and the gap comprises at least one Sp, Sp, or Rp motif. In certain embodiments, populations of modified oligonucleotides are enriched for modified oligonucleotides comprising such internucleoside linkage motifs.

[0366] In certain embodiments, modified oligonucleotides have an internucleoside linkage motif selected from: 5′-soosssssssssooss-3′, 5′-sooosssssssssssooss-3′, 5′-sooosssssssssssooos-3′, 5′-sossssssssssssssoss-3′, 5′-ssoosssssssssssooss-3′, 5′-sooosssssssssooss-3′, 5′-sossssssssssssoss-3′, and 5′-sooooossssssssssoss-3′. In certain embodiments, each “s” represents a phosphorothioate internucleoside linkage and each “o” represents a phosphodiester internucleoside linkage.

[0367] In certain embodiments, modified oligonucleotides have an internucleoside linkage motif comprising one or more mesyl phosphoramidate linking groups. In certain embodiments, one or more phosphorothioate internucleoside linkages or one or more phosphodiester internucleoside linkages of the internucleoside linkage motifs herein is substituted with a mesyl phosphoramidates linking group.

### C. Certain Lengths

[0368] It is possible to increase or decrease the length of an oligonucleotide without eliminating activity. For example, in Woolf et al. (Proc. Natl. Acad. Sci. USA 89:7305-7309, 1992), a series of oligonucleotides 13-25 nucleobases in length were tested for their ability to induce cleavage of a target RNA in an oocyte injection model. Oligonucleotides 25 nucleobases in length with 8 or 11 mismatch bases near the ends of the oligonucleotides were able to direct specific cleavage of the target RNA, albeit to a lesser extent than the oligonucleotides that contained no mismatches. Similarly, target specific cleavage was achieved using 13 nucleobase oligonucleotides, including those with 1 or 3 mismatches.

[0369] In certain embodiments, oligonucleotides (including modified oligonucleotides) can have any of a variety of ranges of lengths. In certain embodiments, oligonucleotides consist of X to Y linked nucleosides, where X represents the fewest number of nucleosides in the range and Y represents the largest number nucleosides in the range. In certain such embodiments, X and Y are each independently selected from 8, 9, 10, 11, 12, 13, 14, 15, 16, 17, 18, 19, 20, 21, 22, 23, 24, 25, 26, 27, 28, 29, 30, 31, 32, 33, 34, 35, 36, 37, 38, 39, 40, 41, 42, 43, 44, 45, 46, 47, 48, 49, and 50; provided that X≤Y. For example, in certain embodiments, oligonucleotides consist of 12 to 13, 12 to 14, 12 to 15, 12 to 16, 12 to 17, 12 to 18, 12 to 19, 12 to 20, 12 to 21, 12 to 22, 12 to 23, 12 to 24, 12 to 25, 12 to 26, 12 to 27, 12 to 28, 12 to 29, 12 to 30, 13 to 14, 13 to 15, 13 to 16, 13 to 17, 13 to 18, 13 to 19, 13 to 20, 13 to 21, 13 to 22, 13 to 23, 13 to 24, 13 to 25, 13 to 26, 13 to 27, 13 to 28, 13 to 29, 13 to 30, 14 to 15, 14 to 16, 14 to 17, 14 to 18, 14 to 19, 14 to 20, 14 to 21, 14 to 22, 14 to 23, 14 to 24, 14 to 25, 14 to 26, 14 to 27, 14 to 28, 14 to 29, 14 to 30, 15 to 16, 15 to 17, 15 to 18, 15 to 19, 15 to 20, 15 to 21, 15 to 22, 15 to 23, 15 to 24, 15 to 25, 15 to 26, 15 to 27, 15 to 28, 15 to 29, 15 to 30, 16 to 17, 16 to 18, 16 to 19, 16 to 20, 16 to 21, 16 to 22, 16 to 23, 16 to 24, 16 to 25, 16 to 26, 16 to 27, 16 to 28, 16 to 29, 16 to 30, 17 to 18, 17 to 19, 17 to 20, 17 to 21, 17 to 22, 17 to 23, 17 to 24, 17 to 25, 17 to 26, 17 to 27, 17 to 28, 17 to 29, 17 to 30, 18 to 19, 18 to 20, 18 to 21, 18 to 22, 18 to 23, 18 to 24, 18 to 25, 18 to 26, 18 to 27, 18 to 28, 18 to 29, 18 to 30, 19 to 20, 19 to 21, 19 to 22, 19 to 23, 19 to 24, 19 to 25, 19 to 26, 19 to 29, 19 to 28, 19 to 29, 19 to 30, 20 to 21, 20 to 22, 20 to 23, 20 to 24, 20 to 25, 20 to 26, 20 to 27, 20 to 28, 20 to 29, 20 to 30, 21 to 22, 21 to 23, 21 to 24, 21 to 25, 21 to 26, 21 to 27, 21 to 28, 21 to 29, 21 to 30, 22 to 23, 22 to 24, 22 to 25, 22 to 26, 22 to 27, 22 to 28, 22 to 29, 22 to 30, 23 to 24, 23 to 25, 23 to 26, 23 to 27, 23 to 28, 23 to 29, 23 to 30, 24 to 25, 24 to 26, 24 to 27, 24 to 28, 24 to 29, 24 to 30, 25 to 26, 25 to 27, 25 to 28, 25 to 29, 25 to 30, 26 to 27, 26 to 28, 26 to 29, 26 to 30, 27 to 28, 27 to 29, 27 to 30, 28 to 29, 28 to 30, or 29 to 30 linked nucleosides.

[0370] In certain embodiments, oligonucleotides consist of 16 linked nucleosides. In certain embodiments, oligonucleotides consist of 17 linked nucleosides. In certain embodiments, oligonucleotides consist of 18 linked nucleosides. In certain embodiments, oligonucleotides consist of 19 linked nucleosides. In certain embodiments, oligonucleotides consist of 20 linked nucleosides.

### D. Certain Modified Oligonucleotides

[0371] In certain embodiments, the above modifications (sugar, nucleobase, internucleoside linkage) are incorporated into a modified oligonucleotide. In certain embodiments, modified oligonucleotides are characterized by their modification motifs and overall lengths. In certain embodiments, such parameters are each independent of one another. Thus, unless otherwise indicated, each internucleoside linkage of an oligonucleotide having a gapmer sugar motif may be modified or unmodified and may or may not follow the gapmer modification pattern of the sugar modifications. For example, the internucleoside linkages within the wing regions of a sugar gapmer may be the same or different from one another and may be the same or different from the internucleoside linkages of the gap region of the sugar motif. Likewise, such sugar gapmer oligonucleotides may comprise one or more modified nucleobase independent of the gapmer pattern of the sugar modifications. Unless otherwise indicated, all modifications are independent of nucleobase sequence.

### E. Certain Populations of Modified Oligonucleotides

[0372] Populations of modified oligonucleotides in which all of the modified oligonucleotides of the population have the same molecular formula can be stereorandom populations or chirally enriched populations. All of the chiral centers of all of the modified oligonucleotides are stereorandom in a stereorandom population. In a chirally enriched population, at least one particular chiral center is not stereorandom in the modified oligonucleotides of the population. In certain embodiments, the modified oligonucleotides of a chirally enriched population are enriched for β-D ribosyl sugar moieties, and all of the phosphorothioate internucleoside linkages are stereorandom. In certain embodiments, the modified oligonucleotides of a chirally enriched population are enriched for both β-D ribosyl sugar moieties and at least one, particular phosphorothioate internucleoside linkage in a particular stereochemical configuration.

### F. Nucleobase Sequence

[0373] In certain embodiments, oligonucleotides (unmodified or modified oligonucleotides) are further described by their nucleobase sequence. In certain embodiments oligonucleotides have a nucleobase sequence that is complementary to a second oligonucleotide or an identified reference nucleic acid, such as a target nucleic acid. In certain such embodiments, a region of an oligonucleotide has a nucleobase sequence that is complementary to a second oligonucleotide or an identified reference nucleic acid, such as a target nucleic acid. In certain embodiments, the nucleobase sequence of a region or entire length of an oligonucleotide is at least 50%, at least 60%, at least 70%, at least 80%, at least 85%, at least 90%, at least 95%, or 100% complementary to the second oligonucleotide or nucleic acid, such as a target nucleic acid.

### II. Certain Oligomeric Compounds

[0374] In certain embodiments, provided herein are oligomeric compounds, which consist of an oligonucleotide (modified or unmodified) and optionally one or more conjugate groups and/or terminal groups. Conjugate groups consist of one or more conjugate moiety and a conjugate linker which links the conjugate moiety to the oligonucleotide. Conjugate groups may be attached to either or both ends of an oligonucleotide and/or at any internal position. In certain embodiments, conjugate groups are attached to the 2′-position of a nucleoside of a modified oligonucleotide. In certain embodiments, conjugate groups that are attached to either or both ends of an oligonucleotide are terminal groups. In certain such embodiments, conjugate groups or terminal groups are attached at the 3′ and/or 5′-end of oligonucleotides. In certain such embodiments, conjugate groups (or terminal groups) are attached at the 3′-end of oligonucleotides. In certain embodiments, conjugate groups are attached near the 3′-end of oligonucleotides. In certain embodiments, conjugate groups (or terminal groups) are attached at the 5′-end of oligonucleotides. In certain embodiments, conjugate groups are attached near the 5′-end of oligonucleotides.

[0375] Examples of terminal groups include but are not limited to conjugate groups, capping groups, phosphate moieties, protecting groups, modified or unmodified nucleosides, and two or more nucleosides that are independently modified or unmodified.

### A. Certain Conjugate Groups

[0376] In certain embodiments, oligonucleotides are covalently attached to one or more conjugate groups. In certain embodiments, conjugate groups modify one or more properties of the attached oligonucleotide, including but not limited to pharmacodynamics, pharmacokinetics, stability, binding, absorption, tissue distribution, cellular distribution, cellular uptake, charge and clearance.

[0377] In certain embodiments, conjugation of one or more carbohydrate moieties to a modified oligonucleotide can optimize one or more properties of the modified oligonucleotide. In certain embodiments, the carbohydrate moiety is attached to a modified subunit of the modified oligonucleotide. For example, the ribose sugar of one or more ribonucleotide subunits of a modified oligonucleotide can be replaced with another moiety, e.g. a non-carbohydrate (preferably cyclic) carrier to which is attached a carbohydrate ligand. A ribonucleotide subunit in which the ribose sugar of the subunit has been so replaced is referred to herein as a ribose replacement modification subunit (RRMS), which is a modified sugar moiety. A cyclic carrier may be a carbocyclic ring system, i.e., one or more ring atoms may be a heteroatom, e.g., nitrogen, oxygen, sulphur. The cyclic carrier may be a monocyclic ring system, or may contain two or more rings, e.g. fused rings. The cyclic carrier may be a fully saturated ring system, or it may contain one or more double bonds. In certain embodiments, the modified oligonucleotide is a gapmer.

[0378] In certain embodiments, conjugate groups impart a new property on the attached oligonucleotide, e.g., fluorophores or reporter groups that enable detection of the oligonucleotide. Certain conjugate groups and conjugate moieties have been described previously, for example: cholesterol moiety (Letsinger et al., Proc. Natl. Acad. Sci. USA, 1989, 86, 6553-6556), cholic acid (Manoharan et al., Bioorg. Med. Chem. Lett., 1994, 4, 1053-1060), a thioether, e.g., hexyl-S-tritylthiol (Manoharan et al., Ann. N.Y. Acad. Sci., 1992, 660, 306-309; Manoharan et al., Bioorg. Med. Chem. Lett., 1993, 3, 2765-2770), a thiocholesterol (Oberhauser et al., Nucl. Acids Res., 1992, 20, 533-538), an aliphatic chain, e.g., do-decan-diol or undecyl residues (Saison-Behmoaras et al., EMBO J, 1991, 10, 1111-1118; Kabanov et al., FEBS Lett., 1990, 259, 327-330; Svinarchuk et al., Biochimie, 1993, 75, 49-54), a phospholipid, e.g., di-hexadecyl-rac-glycerol or triethyl-ammonium 1,2-di-O-hexadecyl-rac-glycero-3-H-phosphonate (Manoharan et al., Tetrahedron Lett., 1995, 36, 3651-3654; Shea et al., Nucl. Acids Res., 1990, 18, 3777-3783), a polyamine or a polyethylene glycol chain (Manoharan et al., Nucleosides & Nucleotides, 1995, 14, 969-973), or adamantane acetic acid a palmityl moiety (Mishra et al., Biochim. Biophys. Acta, 1995, 1264, 229-237), an octadecylamine or hexylamino-carbonyl-oxycholesterol moiety (Crooke et al., J Pharmacol. Exp. Ther., 1996, 277, 923-937), a tocopherol group (Nishina et al., Molecular Therapy Nucleic Acids, 2015, 4, e220; and Nishina et al., Molecular Therapy, 2008, 16, 734-740), or a GalNAc cluster (e.g., WO2014/179620).

[0379] In certain embodiments, the conjugate group may comprise a conjugate moiety selected from any of a C22 alkyl, C20 alkyl, C16 alkyl, C10 alkyl, C21 alkyl, C19 alkyl, C18 alkyl, C15 alkyl, C14 alkyl, C13 alkyl, C12 alkyl, C11 alkyl, C9 alkyl, C8 alkyl, C7 alkyl, C6 alkyl, C5 alkyl, C22 alkenyl, C20 alkenyl, C16 alkenyl, C10 alkenyl, C21 alkenyl, C19 alkenyl, C18 alkenyl, C15 alkenyl, C14 alkenyl, C13 alkenyl, C12 alkenyl, C11 alkenyl, C9 alkenyl, C8 alkenyl, C7 alkenyl, C6 alkenyl, or C5 alkenyl.

[0380] In certain embodiments, the conjugate group may comprise a conjugate moiety selected from any of a C22 alkyl, C20 alkyl, C16 alkyl, C10 alkyl, C21 alkyl, C19 alkyl, C18 alkyl, C15 alkyl, C14 alkyl, C13 alkyl, C12 alkyl, C11 alkyl, C9 alkyl, C8 alkyl, C7 alkyl, C6 alkyl, or C5 alkyl, where the alkyl chain has one or more unsaturated bonds.

[0381] In certain embodiments, a conjugate group is a lipid having the following structure:

[chemical structure]

### 1. Conjugate Moieties

[0382] Conjugate moieties include, without limitation, intercalators, reporter molecules, polyamines, polyamides, peptides, carbohydrates, antibodies, vitamin moieties, polyethylene glycols, thioethers, polyethers, cholesterols, thiocholesterols, cholic acid moieties, folate, lipids, phospholipids, biotin, phenazine, phenanthridine, anthraquinone, adamantane, acridine, fluoresceins, rhodamines, coumarins, fluorophores, and dyes.

[0383] In certain embodiments, a conjugate moiety comprises an active drug substance, for example, aspirin, warfarin, phenylbutazone, ibuprofen, suprofen, fen-bufen, ketoprofen, (S)-(+)-pranoprofen, carprofen, dansylsarcosine, 2,3,5-triiodobenzoic acid, fingolimod, flufenamic acid, folinic acid, a benzothiadiazide, chlorothiazide, a diazepine, indo-methicin, a barbiturate, a cephalosporin, a sulfa drug, an antidiabetic, an antibacterial or an antibiotic.

### 2. Conjugate Linkers

[0384] Conjugate moieties are attached to oligonucleotides through conjugate linkers. In certain oligomeric compounds, the conjugate linker is a single chemical bond (i.e., the conjugate moiety is attached directly to an oligonucleotide through a single bond). In certain embodiments, the conjugate linker comprises a chain structure, such as a hydrocarbyl chain, or an oligomer of repeating units such as ethylene glycol, nucleosides, or amino acid units.

[0385] In certain embodiments, a conjugate linker comprises pyrrolidine.

[0386] In certain embodiments, a conjugate linker comprises one or more groups selected from alkyl, amino, oxo, amide, disulfide, polyethylene glycol, ether, thioether, and hydroxylamino. In certain such embodiments, the conjugate linker comprises groups selected from alkyl, amino, oxo, amide and ether groups. In certain embodiments, the conjugate linker comprises groups selected from alkyl and amide groups. In certain embodiments, the conjugate linker comprises groups selected from alkyl and ether groups. In certain embodiments, the conjugate linker comprises at least one phosphorus moiety. In certain embodiments, the conjugate linker comprises at least one phosphate group. In certain embodiments, the conjugate linker includes at least one neutral linking group.

[0387] In certain embodiments, conjugate linkers, including the conjugate linkers described above, are bifunctional linking moieties, e.g., those known in the art to be useful for attaching conjugate groups to parent compounds, such as the oligonucleotides provided herein. In general, a bifunctional linking moiety comprises at least two functional groups. One of the functional groups is selected to bind to a particular site on a parent compound and the other is selected to bind to a conjugate group. Examples of functional groups used in a bifunctional linking moiety include but are not limited to electrophiles for reacting with nucleophilic groups and nucleophiles for reacting with electrophilic groups. In certain embodiments, bifunctional linking moieties comprise one or more groups selected from amino, hydroxyl, carboxylic acid, thiol, alkyl, alkenyl, and alkynyl.

[0388] Examples of conjugate linkers include but are not limited to pyrrolidine, 8-amino-3,6-dioxaoctanoic acid (ADO), succinimidyl 4-(N-maleimidomethyl) cyclohexane-1-carboxylate (SMCC) and 6-aminohexanoic acid (AHEX or AHA). Other conjugate linkers include but are not limited to substituted or unsubstituted C₁-C₁₀ alkyl, substituted or unsubstituted C₂-C₁₀ alkenyl or substituted or unsubstituted C₂-C₁₀ alkynyl, wherein a nonlimiting list of preferred substituent groups includes hydroxyl, amino, alkoxy, carboxy, benzyl, phenyl, nitro, thiol, thioalkoxy, halogen, alkyl, aryl, alkenyl and alkynyl.

[0389] In certain embodiments, conjugate linkers comprise 1-10 linker-nucleosides. In certain embodiments, conjugate linkers comprise 2-5 linker-nucleosides. In certain embodiments, conjugate linkers comprise exactly 3 linker-nucleosides. In certain embodiments, conjugate linkers comprise the TCA motif. In certain embodiments, such linker-nucleosides are modified nucleosides. In certain embodiments such linker-nucleosides comprise a modified sugar moiety. In certain embodiments, linker-nucleosides are unmodified. In certain embodiments, linker-nucleosides comprise an optionally protected heterocyclic base selected from a purine, substituted purine, pyrimidine or substituted pyrimidine. In certain embodiments, a cleavable moiety is a nucleoside selected from uracil, thymine, cytosine, 4-N-benzoylcytosine, 5-methylcytosine, 4-N-benzoyl-5-methyl cytosine, adenine, 6-N-benzoyladenine, guanine and 2-N-isobutyrylguanine. It is typically desirable for linker-nucleosides to be cleaved from the oligomeric compound after it reaches a target tissue. Accordingly, linker-nucleosides are typically linked to one another and to the remainder of the oligomeric compound through cleavable bonds. In certain embodiments, such cleavable bonds are phosphodiester bonds.

[0390] Herein, linker-nucleosides are not considered to be part of the oligonucleotide. Accordingly, in embodiments in which an oligomeric compound comprises an oligonucleotide consisting of a specified number or range of linked nucleosides and/or a specified percent complementarity to a reference nucleic acid and the oligomeric compound also comprises a conjugate group comprising a conjugate linker comprising linker-nucleosides, those linker-nucleosides are not counted toward the length of the oligonucleotide and are not used in determining the percent complementarity of the oligonucleotide for the reference nucleic acid. For example, an oligomeric compound may comprise (1) a modified oligonucleotide consisting of 8-30 nucleosides and (2) a conjugate group comprising 1-10 linker-nucleosides that are contiguous with the nucleosides of the modified oligonucleotide. The total number of contiguous linked nucleosides in such an oligomeric compound is more than 30. Alternatively, an oligomeric compound may comprise a modified oligonucleotide consisting of 8-30 nucleosides and no conjugate group. The total number of contiguous linked nucleosides in such an oligomeric compound is no more than 30. Unless otherwise indicated conjugate linkers comprise no more than 10 linker-nucleosides. In certain embodiments, conjugate linkers comprise no more than 5 linker-nucleosides. In certain embodiments, conjugate linkers comprise no more than 3 linker-nucleosides. In certain embodiments, conjugate linkers comprise no more than 2 linker-nucleosides. In certain embodiments, conjugate linkers comprise no more than 1 linker-nucleoside.

[0391] In certain embodiments, it is desirable for a conjugate group to be cleaved from the oligonucleotide. For example, in certain circumstances oligomeric compounds comprising a particular conjugate moiety are better taken up by a particular cell type, but once the oligomeric compound has been taken up, it is desirable that the conjugate group be cleaved to release the unconjugated or parent oligonucleotide. Thus, certain conjugate linkers may comprise one or more cleavable moieties. In certain embodiments, a cleavable moiety is a cleavable bond. In certain embodiments, a cleavable moiety is a group of atoms comprising at least one cleavable bond. In certain embodiments, a cleavable moiety comprises a group of atoms having one, two, three, four, or more than four cleavable bonds. In certain embodiments, a cleavable moiety is selectively cleaved inside a cell or subcellular compartment, such as a lysosome. In certain embodiments, a cleavable moiety is selectively cleaved by endogenous enzymes, such as nucleases.

[0392] In certain embodiments, a cleavable bond is selected from among: an amide, an ester, an ether, one or both esters of a phosphodiester, a phosphate ester, a carbamate, or a disulfide. In certain embodiments, a cleavable bond is one or both of the esters of a phosphodiester. In certain embodiments, a cleavable moiety comprises a phosphate or phosphodiester. In certain embodiments, the cleavable moiety is a phosphate linkage between an oligonucleotide and a conjugate moiety or conjugate group.

[0393] In certain embodiments, a cleavable moiety comprises or consists of one or more linker-nucleosides. In certain such embodiments, the one or more linker-nucleosides are linked to one another and/or to the remainder of the oligomeric compound through cleavable bonds. In certain embodiments, such cleavable bonds are unmodified phosphodiester bonds. In certain embodiments, a cleavable moiety is 2′-deoxynucleoside that is attached to either the 3′ or 5′-terminal nucleoside of an oligonucleotide by a phosphate internucleoside linkage and covalently attached to the remainder of the conjugate linker or conjugate moiety by a phosphate or phosphorothioate linkage. In certain such embodiments, the cleavable moiety is 2′-deoxyadenosine.

### 3. Cell-Targeting Moieties

[0394] In certain embodiments, a conjugate group comprises a cell-targeting moiety. In certain embodiments, a conjugate group has the general formula:

[chemical structure]

[0395] wherein n is from 1 to about 3, m is 0 when n is 1, m is 1 when n is 2 or greater, j is 1 or 0, and k is 1 or 0.

[0396] In certain embodiments, n is 1, j is 1 and k is 0. In certain embodiments, n is 1, j is 0 and k is 1. In certain embodiments, n is 1, j is 1 and k is 1. In certain embodiments, n is 2, j is 1 and k is 0. In certain embodiments, n is 2, j is 0 and k is 1. In certain embodiments, n is 2, j is 1 and k is 1. In certain embodiments, n is 3, j is 1 and k is 0. In certain embodiments, n is 3, j is 0 and k is 1. In certain embodiments, n is 3, j is 1 and k is 1.

[0397] In certain embodiments, conjugate groups comprise cell-targeting moieties that have at least one tethered ligand. In certain embodiments, cell-targeting moieties comprise two tethered ligands covalently attached to a branching group. In certain embodiments, cell-targeting moieties comprise three tethered ligands covalently attached to a branching group.

[0398] In certain embodiments, each ligand of a cell-targeting moiety has an affinity for at least one type of receptor on a target cell. In certain embodiments, each ligand has an affinity for at least one type of receptor on the surface of a mammalian liver cell. In certain embodiments, each ligand has an affinity for the hepatic asialoglycoprotein receptor (ASGP-R). In certain embodiments, each ligand is a carbohydrate.

[0399] In certain embodiments, a conjugate group comprises a cell-targeting conjugate moiety. In certain embodiments, a conjugate group has the general formula:

[chemical structure]

[0400] wherein n is from 1 to about 3, m is 0 when n is 1, m is 1 when n is 2 or greater, j is 1 or 0, and k is 1 or 0.

[0401] In certain embodiments, n is 1, j is 1 and k is 0. In certain embodiments, n is 1, j is 0 and k is 1. In certain embodiments, n is 1, j is 1 and k is 1. In certain embodiments, n is 2, j is 1 and k is 0. In certain embodiments, n is 2, j is 0 and k is 1. In certain embodiments, n is 2, j is 1 and k is 1. In certain embodiments, n is 3, j is 1 and k is 0. In certain embodiments, n is 3, j is 0 and k is 1. In certain embodiments, n is 3, j is 1 and k is 1.

[0402] In certain embodiments, conjugate groups comprise cell-targeting moieties that have at least one tethered ligand. In certain embodiments, cell-targeting moieties comprise two tethered ligands covalently attached to a branching group. In certain embodiments, cell-targeting moieties comprise three tethered ligands covalently attached to a branching group.

[0403] In certain embodiments, the cell-targeting moiety targets neurons. In certain embodiments, the cell-targeting moiety targets a neurotransmitter receptor. In certain embodiments, the cell targeting moiety targets a neurotransmitter transporter. In certain embodiments, the cell targeting moiety targets a GABA transporter. See e.g., WO 2011/131693, WO 2014/064257.

[0404] In certain embodiments, conjugate groups comprise cell-targeting moieties that have affinities for transferrin receptor (TfR) (also referred to herein as TfR1 and CD71). In certain embodiments, a conjugate group described herein comprises an anti-TfR1 antibody or fragment thereof. In certain embodiments, the conjugate group comprises a protein or peptide capable of binding TfR1. In certain embodiments, the conjugate group comprises an aptamer capable of binding TfR1. In certain embodiments, the anti-TfR1 antibody or fragment thereof can be any known in the art including but not limited to those described in WO1991/004753; WO2013/103800; WO2014/144060; WO2016/081643; WO2016/179257; WO2016/207240; WO2017/221883; WO2018/129384; WO2018/124121; WO2019/151539; WO2020/132584; WO2020/028864; U.S. Pat. Nos. 7,208,174; 9,034,329; and 10,550,188. In certain embodiments, a fragment of an anti-TfR1 antibody is F(ab′)2, Fab, Fab′, Fv, or scFv.

[0405] In certain embodiments, the conjugate group comprises a protein or peptide capable of binding TfR1. In certain embodiments, the protein or peptide capable of binding TfR1 can be any known in the art including but not limited to those described in WO2019/140050; WO2020/037150; WO2020/124032; and U.S. Pat. No. 10,138,483.

[0406] In certain embodiments, the conjugate group comprises an aptamer capable of binding TfR1. In certain embodiments, the aptamer capable of binding TfR1 can be any known in the art including but not limited to those described in WO2013/163303; WO2019/033051; and WO2020/245198.

### B. Certain Terminal Groups

[0407] In certain embodiments, oligomeric compounds comprise one or more terminal groups. In certain such embodiments, oligomeric compounds comprise a stabilized 5′-phophate. Stabilized 5′-phosphates include, but are not limited to 5′-phosphanates, including, but not limited to 5′-vinylphosphonates. In certain embodiments, terminal groups comprise one or more abasic nucleosides and/or inverted nucleosides. In certain embodiments, terminal groups comprise one or more 2′-linked nucleosides. In certain such embodiments, the 2′-linked nucleoside is an abasic nucleoside.

### III. Oligomeric Duplexes

[0408] In certain embodiments, oligomeric compounds described herein comprise an oligonucleotide, having a nucleobase sequence complementary to that of a target nucleic acid. In certain embodiments, an oligomeric compound is paired with a second oligomeric compound to form an oligomeric duplex. Such oligomeric duplexes comprise a first oligomeric compound having a region complementary to a target nucleic acid and a second oligomeric compound having a region complementary to the first oligomeric compound. In certain embodiments, the first oligomeric compound of an oligomeric duplex comprises or consists of (1) a modified or unmodified oligonucleotide and optionally a conjugate group and (2) a second modified or unmodified oligonucleotide and optionally a conjugate group. Either or both oligomeric compounds of an oligomeric duplex may comprise a conjugate group. The oligonucleotides of each oligomeric compound of an oligomeric duplex may include non-complementary overhanging nucleosides.

### IV. Antisense Activity

[0409] In certain embodiments, oligomeric compounds and oligomeric duplexes are capable of hybridizing to a target nucleic acid, resulting in at least one antisense activity; such oligomeric compounds and oligomeric duplexes are antisense compounds. In certain embodiments, antisense compounds have antisense activity when they reduce or inhibit the amount or activity of a target nucleic acid by 25% or more in the standard in vitro assay. In certain embodiments, antisense compounds selectively affect one or more target nucleic acid. Such antisense compounds comprise a nucleobase sequence that hybridizes to one or more target nucleic acid, resulting in one or more desired antisense activity and does not hybridize to one or more non-target nucleic acid or does not hybridize to one or more non-target nucleic acid in such a way that results in significant undesired antisense activity.

[0410] In certain antisense activities, hybridization of an antisense compound to a target nucleic acid results in recruitment of a protein that cleaves the target nucleic acid. For example, certain antisense compounds result in RNase H mediated cleavage of the target nucleic acid. RNase H is a cellular endonuclease that cleaves the RNA strand of an RNA:DNA duplex. The DNA in such an RNA:DNA duplex need not be unmodified DNA. In certain embodiments, described herein are antisense compounds that are sufficiently “DNA-like” to elicit RNase H activity. In certain embodiments, one or more non-DNA-like nucleoside in the gap of a gapmer is tolerated.

[0411] In certain antisense activities, an antisense compound or a portion of an antisense compound is loaded into an RNA-induced silencing complex (RISC), ultimately resulting in cleavage of the target nucleic acid. For example, certain antisense compounds result in cleavage of the target nucleic acid by Argonaute. Antisense compounds that are loaded into RISC are RNAi agents. RNAi agents may be double-stranded (siRNA or dsRNAi) or single-stranded (ssRNAi).

[0412] In certain embodiments, hybridization of an antisense compound to a target nucleic acid does not result in recruitment of a protein that cleaves that target nucleic acid. In certain embodiments, hybridization of the antisense compound to the target nucleic acid results in alteration of splicing of the target nucleic acid. In certain embodiments, hybridization of an antisense compound to a target nucleic acid results in inhibition of a binding interaction between the target nucleic acid and a protein or other nucleic acid. In certain embodiments, hybridization of an antisense compound to a target nucleic acid results in alteration of translation of the target nucleic acid.

[0413] Antisense activities may be observed directly or indirectly. In certain embodiments, observation or detection of an antisense activity involves observation or detection of a change in an amount of a target nucleic acid or protein encoded by such target nucleic acid, a change in the ratio of splice variants of a nucleic acid or protein and/or a phenotypic change in a cell or subject.

### V. Certain Target Nucleic Acids

[0414] In certain embodiments, oligomeric compounds comprise or consist of an oligonucleotide comprising a region that is complementary to a target nucleic acid. In certain embodiments, the target nucleic acid is an endogenous RNA molecule. In certain embodiments, the target nucleic acid encodes a protein. In certain such embodiments, the target nucleic acid is selected from: a mature mRNA and a pre-mRNA, including intronic, exonic and untranslated regions. In certain embodiments, the target RNA is a mature mRNA. In certain embodiments, the target nucleic acid is a pre-mRNA. In certain such embodiments, the target region is entirely within an intron. In certain embodiments, the target region spans an intron/exon junction. In certain embodiments, the target region is at least 50% within an intron. In certain embodiments, the target nucleic acid is the RNA transcriptional product of a retrogene. In certain embodiments, the target nucleic acid is a non-coding RNA. In certain such embodiments, the target non-coding RNA is selected from: a long non-coding RNA, a short non-coding RNA, an intronic RNA molecule.

### A. Complementarity/Mismatches to the Target Nucleic Acid

[0415] In certain embodiments, oligonucleotides are complementary to the target nucleic acid over the entire length of the oligonucleotide. In certain embodiments, oligonucleotides are 99%, 95%, 90%, 85%, or 80% complementary to the target nucleic acid. In certain embodiments, oligonucleotides are at least 80% complementary to the target nucleic acid over the entire length of the oligonucleotide and comprise a region that is 100% or fully complementary to a target nucleic acid. In certain embodiments, the region of full complementarity is from 6 to 20, 10 to 18, or 18 to 20 nucleobases in length.

[0416] It is possible to introduce mismatch bases without eliminating activity. For example, Gautschi et al (J. Natl. Cancer Inst. 93:463-471, March 2001) demonstrated the ability of an oligonucleotide having 100% complementarity to the bcl-2 mRNA and having 3 mismatches to the bcl-xL mRNA to reduce the expression of both bcl-2 and bcl-xL in vitro and in vivo. Furthermore, this oligonucleotide demonstrated potent anti-tumor activity in vivo. Maher and Dolnick (Nuc. Acid. Res. 16:3341-3358, 1988) tested a series of tandem 14 nucleobase oligonucleotides, and a 28 and 42 nucleobase oligonucleotides comprised of the sequence of two or three of the tandem oligonucleotides, respectively, for their ability to arrest translation of human DHFR in a rabbit reticulocyte assay. Each of the three 14 nucleobase oligonucleotides alone was able to inhibit translation, albeit at a more modest level than the 28 or 42 nucleobase oligonucleotides.

[0417] In certain embodiments, oligonucleotides are complementary to the target nucleic acid over the entire length of the oligonucleotide. In certain embodiments, oligonucleotides are 99%, 95%, 90%, 85%, or 80% complementary to the target nucleic acid. In certain embodiments, oligonucleotides are at least 80% complementary to the target nucleic acid over the entire length of the oligonucleotide and comprise a region that is 100% or fully complementary to a target nucleic acid. In certain embodiments, the region of full complementarity is from 6 to 20, 10 to 18, or 18 to 20 nucleobases in length.

[0418] In certain embodiments, oligonucleotides comprise one or more mismatched nucleobases relative to the target nucleic acid. In certain embodiments, antisense activity against the target is reduced by such mismatch, but activity against a non-target is reduced by a greater amount. Thus, in certain embodiments selectivity of the oligonucleotide is improved. In certain embodiments, the mismatch is specifically positioned within an oligonucleotide having a gapmer motif. In certain embodiments, the mismatch is at position 1, 2, 3, 4, 5, 6, 7, or 8 from the 5′-end of the gap region. In certain embodiments, the mismatch is at position 9, 8, 7, 6, 5, 4, 3, 2, 1 from the 3′-end of the gap region. In certain embodiments, the mismatch is at position 1, 2, 3, or 4 from the 5′-end of the wing region. In certain embodiments, the mismatch is at position 4, 3, 2, or 1 from the 3′-end of the wing region.

### B. HTT

[0419] In certain embodiments, oligomeric compounds comprise or consist of an oligonucleotide comprising a region that is complementary to an HTT nucleic acid. In certain embodiments, the HTT nucleic acid has the sequence set forth as GENBANK Accession No. NM_002111.6 (incorporated herein as SEQ ID NO: 1), GENBANK Accession No. NT_006081.17 truncated from nucleotides 462000 to 634000 (incorporated herein as SEQ ID NO: 2), GENBANK Accession No. NM_010414.1 (incorporated herein as SEQ ID NO: 3), the complement of GENBANK Accession No. NW_001109716.1 truncated at nucleotides 698000 to 866000 (incorporated herein as SEQ ID NO: 4), and GENBANK Accession No. NM_024357.2 (incorporated herein as SEQ ID NO: 5).

[0420] In certain embodiments an oligomeric compound complementary to any one of SEQ ID NOs: 1-5 is capable of reducing HTT RNA in a cell. In certain embodiments an oligomeric compound complementary to any one of SEQ ID NOs: 1-5 is capable of reducing HTT protein in a cell. In certain embodiments, the cell is in vitro. In certain embodiments, the cell is in a subject. In certain embodiments, the oligomeric compound consists of a modified oligonucleotide. In certain embodiments, an oligomeric compound complementary to any one of SEQ ID NOs: 1-5 is capable of ameliorating one or more symptom or hallmark of a neurodegenerative disease when it is introduced to a cell in a subject. In certain embodiments, the neurodegenerative disease is a repeat expansion disease. In certain embodiments, the repeat expansion disease is selected from myotonic dystrophy (DM1 and DM2), amyotrophic lateral sclerosis, frontotemporal dementia, Huntington's disease, various polyglutamine disorders, Fragile X syndrome, and a spinocerebellar ataxia (SCA1, SCA2, SCA3, SCA6, SCA7, SCA8, SCA10, SCA17, or Friedrich's ataxia). In certain embodiments, the symptom or hallmark is brain atrophy, reduced brain activity, reduced brain connectivity, muscle atrophy, muscle weakness, muscle cramping, difficulty swallowing, seizure, tremor, nerve degeneration, cardiac failure, impaired glucose tolerance, weight loss, osteoporosis, testicular atrophy, impaired global function, impaired motor function, impaired cognitive function, impaired daily function, impaired attention, impaired visuoperceptual processing, impaired working memory, impaired psychomotor speed, impaired verbal motor output, impaired degree of independence, impaired apathy, impaired learning ability, impaired mental concentration, impaired speech, depression, irritability, anger, impaired mobility, impaired self-care, pain, discomfort, anxiety, suicidal ideation, suicidal behavior, or a combination thereof.

[0421] In certain embodiments, an oligomeric compound complementary to any one of SEQ ID NOs: 1-5 is capable of reducing a detectable amount of HTT RNA in the CSF of a subject after the oligomeric compound is administered to the subject. The detectable amount of HTT RNA may be reduced by at least 10%, at least 20%, at least 30%, at least 40%, at least 50%, at least 60%, at least 70%, at least 80%, or at least 90%. In certain embodiments, an oligomeric compound complementary to any one of SEQ ID NOs: 1-5 is capable of reducing a detectable amount of HTT protein in the CSF of the subject when the oligomeric compound is administered to the subject. The detectable amount of HTT protein may be reduced by at least 10%, at least 20%, at least 30%, at least 40%, at least 50%, at least 60%, at least 70%, at least 80%, or at least 90%. In certain embodiments, an oligomeric compound complementary to any one of SEQ ID NOs: 1-5 is capable of reducing a detectable amount of mHTT protein in the CSF of the subject when the oligomeric compound is administered to the subject. The detectable amount of mHTT protein may be reduced by at least 10%, at least 20%, at least 30%, at least 40%, at least 50%, at least 60%, at least 70%, at least 80%, or at least 90%. In certain embodiments, the oligomeric compound is administered into the CSF of the subject.

### C. Certain Target Nucleic Acids in Certain Tissues

[0422] In certain embodiments, oligomeric compounds comprise or consist of an oligonucleotide comprising a region that is complementary to a target nucleic acid, wherein the target nucleic acid is expressed in a pharmacologically relevant tissue. In certain embodiments, the pharmacologically relevant tissues are the cells and tissues that comprise the central nervous system (CNS). Such tissues include brain tissues, such as, cortex, substantia nigra, striatum, midbrain, and brainstem and spinal cord.

### VI. Certain Methods and Uses

[0423] Certain embodiments provided herein relate to methods of reducing or inhibiting HTT expression or activity, which can be useful for treating, preventing, or ameliorating a repeat expansion disease. In certain embodiments, the repeat expansion disease is myotonic dystrophy (DM1 and DM2), amyotrophic lateral sclerosis, frontotemporal dementia, Huntington's disease, a polyglutamine disorder, Fragile X syndrome, or a spinocerebellar ataxia. In certain embodiments, the repeat expansion disease is Huntington's disease. In certain embodiments, the repeat expansion disease is a spinocerebellar ataxia.

[0424] In certain embodiments, a method comprises administering to a subject an oligomeric compound, a modified oligonucleotide, an oligomeric duplex, or an antisense agent, any of which having a nucleobase sequence complementary to a HTT nucleic acid. In certain embodiments, the subject has or is at risk for developing a repeat expansion disease. In certain embodiments, the subject has or is at risk for developing myotonic dystrophy (DM1 and DM2), amyotrophic lateral sclerosis, frontotemporal dementia, Huntington's disease, a polyglutamine disorder, Fragile X syndrome, or a spinocerebellar ataxia. In certain embodiments, the subject has or is at risk for developing Huntington's disease. In certain embodiments, the subject has or is at risk for developing a spinocerebellar ataxia.

[0425] In certain embodiments, a method of ameliorating, treating, or preventing a repeat expansion disease comprises administering to a subject an oligomeric compound, a modified oligonucleotide, an oligomeric duplex, or an antisense agent, any of which having a nucleobase sequence complementary to a HTT nucleic acid. In certain embodiments, a method of ameliorating or preventing a repeat expansion disease comprises administering to a subject an oligomeric compound, a modified oligonucleotide, an oligomeric duplex, or an antisense agent, any of which having a nucleobase sequence complementary to a HTT nucleic acid. In certain embodiments, the subject has or is at risk for developing a repeat expansion disease. In certain embodiments, the subject has myotonic dystrophy (DM1 and DM2), amyotrophic lateral sclerosis, frontotemporal dementia, Huntington's disease, a polyglutamine disorder, Fragile X syndrome, or a spinocerebellar ataxia. In certain embodiments, the subject has Huntington's disease. In certain embodiments, the subject has a spinocerebellar ataxia. In certain embodiments, at least one symptom or hallmark of the repeat expansion disease is ameliorated. In certain embodiments, the symptom or hallmark is selected from brain atrophy, reduced brain activity, reduced brain connectivity, muscle atrophy, muscle weakness, muscle cramping, difficulty swallowing, seizure, tremor, nerve degeneration, cardiac failure, impaired glucose tolerance, weight loss, osteoporosis, testicular atrophy, impaired global function, impaired motor function, impaired cognitive function, impaired daily function, impaired attention, impaired visuoperceptual processing, impaired working memory, impaired psychomotor speed, impaired verbal motor output, impaired degree of independence, impaired apathy, impaired learning ability, impaired mental concentration, impaired speech, depression, irritability, anger, impaired mobility, impaired self-care, pain, discomfort, anxiety, suicidal ideation, suicidal behavior, and a combination thereof. In certain embodiments, administration of the oligomeric compound, the modified oligonucleotide, the oligomeric duplex, or the antisense agent reduces or delays the onset or progression of brain atrophy, reduced brain activity, reduced brain connectivity, muscle atrophy, muscle weakness, muscle cramping, difficulty swallowing, seizure, tremor, nerve degeneration, cardiac failure, impaired glucose tolerance, weight loss, osteoporosis, testicular atrophy, impaired global function, impaired motor function, impaired cognitive function, impaired daily function, impaired attention, impaired visuoperceptual processing, impaired working memory, impaired psychomotor speed, impaired verbal motor output, impaired degree of independence, impaired apathy, impaired learning ability, impaired mental concentration, impaired speech, depression, irritability, anger, impaired mobility, impaired self-care, pain, discomfort, anxiety, suicidal ideation, or suicidal behavior.

[0426] In certain embodiments, a method of ameliorating, treating, or preventing Huntington's disease comprises administering to a subject an oligomeric compound, a modified oligonucleotide, an oligomeric duplex, or an antisense agent, any of which having a nucleobase sequence complementary to a HTT nucleic acid. In certain embodiments, a method of ameliorating or preventing Huntington's disease comprises administering to a subject an oligomeric compound, a modified oligonucleotide, an oligomeric duplex, or an antisense agent, any of which having a nucleobase sequence complementary to a HTT nucleic acid. In certain embodiments, at least one symptom or hallmark of Huntington's disease is ameliorated. In certain embodiments, the symptom or hallmark is brain atrophy, reduced brain activity, reduced brain connectivity, muscle atrophy, muscle weakness, muscle cramping, difficulty swallowing, seizure, tremor, nerve degeneration, impaired glucose tolerance, impaired global function, impaired motor function, impaired cognitive function, impaired daily function, impaired attention, impaired visuoperceptual processing, impaired working memory, impaired psychomotor speed, impaired verbal motor output, impaired degree of independence, impaired apathy, impaired mental concentration, impaired speech, depression, irritability, impaired mobility, impaired self-care, anxiety, suicidal ideation, or suicidal behavior. In certain embodiments, administration of the oligomeric compound, the modified oligonucleotide, the oligomeric duplex, or the antisense agent reduces or delays the onset or progression of brain atrophy, reduced brain activity, reduced brain connectivity, muscle atrophy, muscle weakness, muscle cramping, difficulty swallowing, seizure, tremor, nerve degeneration, impaired glucose tolerance, impaired global function, impaired motor function, impaired cognitive function, impaired daily function, impaired attention, impaired visuoperceptual processing, impaired working memory, impaired psychomotor speed, impaired verbal motor output, impaired degree of independence, impaired apathy, impaired mental concentration, impaired speech, depression, irritability, impaired mobility, impaired self-care, anxiety, suicidal ideation, or suicidal behavior.

[0427] In certain embodiments, a method of reducing expression of HTT nucleic acid, for example RNA, or reducing expression of HTT protein in a cell comprises contacting the cell with an oligomeric compound, a modified oligonucleotide, an oligomeric duplex, or an antisense agent, any of which having a nucleobase sequence complementary to a HTT nucleic acid. In certain embodiments, the cell is from a subject. In certain embodiments, the subject has or is at risk for developing a repeat expansion disease. In certain embodiments, the subject has or is at risk for developing Huntington's disease. In certain embodiments, the cell is from a brain tissue, optionally from the cortex, substantia nigra, striatum, midbrain, brainstem, or spinal cord. In certain embodiments, the cell is a human cell.

[0428] Certain embodiments are drawn to an oligomeric compound, a modified oligonucleotide, an oligomeric duplex, or an antisense agent, any of which having a nucleobase sequence complementary to a HTT nucleic acid, for use in ameliorating, treating, or preventing a repeat expansion disease or for use in the manufacture of a medicament for ameliorating, treating, or preventing a repeat expansion disease. In certain embodiments, an oligomeric compound, a modified oligonucleotide, an oligomeric duplex, or an antisense agent, any of which having a nucleobase sequence complementary to a HTT nucleic acid, is for use in ameliorating or preventing a repeat expansion disease or for use in the manufacture of a medicament for ameliorating or preventing a repeat expansion disease. In certain embodiments, the repeat expansion disease is selected from myotonic dystrophy (DM1 and DM2), amyotrophic lateral sclerosis, frontotemporal dementia, Huntington's disease, a polyglutamine disorder, Fragile X syndrome, and a spinocerebellar ataxia. In certain embodiments, the repeat expansion disease is Huntington's disease. In certain embodiments, the repeat expansion disease is a spinocerebellar ataxia.

[0429] Certain embodiments are drawn to an oligomeric compound, a modified oligonucleotide, an oligomeric duplex, or an antisense agent, any of which having a nucleobase sequence complementary to a HTT nucleic acid, for use in ameliorating, treating, or preventing Huntington's disease or for use in the manufacture of a medicament for ameliorating, treating, or preventing Huntington's disease. In certain embodiments, an oligomeric compound, a modified oligonucleotide, an oligomeric duplex, or an antisense agent, any of which having a nucleobase sequence complementary to a HTT nucleic acid, is for use in ameliorating or preventing Huntington's disease or for use in the manufacture of a medicament for ameliorating or preventing Huntington's disease.

[0430] In any of the methods or uses described herein, the oligomeric compound, the modified oligonucleotide, the oligomeric duplex, or the antisense agent can be any described herein.

### VII. Certain Compositions

### Compound No. 1394371

[0431] In certain embodiments, Compound No. 1394371 is characterized as a 6-10-4 MOE gapmer, having a sequence of (from 5′ to 3′) CACAGCTTTTATTTCCATAC (incorporated herein as SEQ ID NO: 3619), wherein each of nucleosides 1-6 and 17-20 are 2′-O-methoxyethyl nucleosides, and each of nucleosides 7-16 are β-D-deoxyribonucleosides, wherein the internucleoside linkages between nucleosides 2 to 3, 3 to 4, 4 to 5, 5 to 6, 6 to 7, and 17 to 18 are phosphodiester linkages and the internucleoside linkages between nucleosides 1 to 2, 7 to 8, 8 to 9, 9 to 10, 10 to 11, 11 to 12, 12 to 13, 13 to 14, 14 to 15, 15 to 16, 16 to 17, 18 to 19, and 19 to 20 are phosphorothioate linkages, and wherein each cytosine is a 5-methylcytosine.

[0432] In certain embodiments, Compound No. 1394371 is described by the following chemical notation: ^{m}Cₑₛ Aₑₒ ^{m}Cₑₒ Aₑₒ Gₑₒ ^{m}Cₑₒ T_{ds} T_{ds} T_{ds} T_{ds} A_{ds} T_{ds} T_{ds} T_{ds} ^{m}C_{ds} ^{m}C_{ds} Aₑₒ Tₑₛ Aₑₛ ^{m}Cₑ (SEQ ID NO: 3619); wherein, A=an adenine, ^{m}C=a 5-methylcytosine, G=a guanine, T=a thymine, e=a 2′-O-methoxyethylribose modified sugar, d=a 2′-deoxyribose sugar moiety, s=a phosphorothioate internucleoside linkage, and o=a phosphodiester internucleoside linkage.

[0433] In certain embodiments, Compound No. 1394371 is described by the following chemical structure, or a pharmaceutically acceptable salt thereof:

[chemical structure]

In certain embodiments, a pharmaceutically acceptable salt of Compound No. 1394371 described by Structure 1 comprises one or more cations selected from sodium, potassium, calcium, and magnesium.

[0434] In certain embodiments, the sodium salt of Compound No. 1394371 is described by the following chemical structure:

[chemical structure]

### Compound No. 1315578

[0435] In certain embodiments, Compound No. 1315578 is characterized as a 5-10-5 MOE gapmer, having a sequence of (from 5′ to 3′) GCTTTGATTTTTACCAGTTA (incorporated herein as SEQ ID NO: 1502), wherein each of nucleosides 1-5 and 16-20 are 2′-O-methoxyethyl nucleosides, and each of nucleosides 6-15 are β-D-deoxyribonucleosides, wherein the internucleoside linkages between nucleosides 2 to 3, 3 to 4, 4 to 5, 16 to 17, and 17 to 18 are phosphodiester linkages and the internucleoside linkages between nucleosides 1 to 2, 5 to 6, 6 to 7, 7 to 8, 8 to 9, 9 to 10, 10 to 11, 11 to 12, 12 to 13, 13 to 14, 14 to 15, 15 to 16, 18 to 19, and 19 to 20 are phosphorothioate linkages, and wherein each cytosine is a 5-methylcytosine.

[0436] In certain embodiments, Compound No. 1315578 is described by the following chemical notation: Gₑₛ ^{m}Cₑₒ Tₑₒ Tₑₒ Tₑₛ G_{ds} A_{ds} T_{ds} T_{ds} T_{ds} T_{ds} T_{ds} A_{ds} ^{m}C_{ds} ^{m}C_{ds} Aₑₒ Gₑₒ Tₑₛ Tₑₛ Aₑ (SEQ ID NO: 1502); wherein, A=an adenine, ^{m}C=a 5-methylcytosine, G=a guanine, T=a thymine, e=a 2′-O-methoxyethylribose modified sugar, d=a 2′-deoxyribose sugar moiety, s=a phosphorothioate internucleoside linkage, and o=a phosphodiester internucleoside linkage.

[0437] In certain embodiments, Compound No. 1315578 is described by the following chemical structure, or a pharmaceutically acceptable salt thereof:

[chemical structure]

[0438] In certain embodiments, a pharmaceutically acceptable salt of Compound No. 1315578 described by Structure 3 comprises one or more cations selected from sodium, potassium, calcium, and magnesium.

[0439] In certain embodiments, the sodium salt of Compound No. 1315578 is described by the following chemical structure:

[chemical structure]

### Compound No. 1394378

[0440] In certain embodiments, Compound No. 1394378 is characterized as a 6-10-4 MOE gapmer, having a sequence of (from 5′ to 3′) ACAGCTTTTATTTCCATACA (incorporated herein as SEQ ID NO: 3646), wherein each of nucleosides 1-6 and 17-20 are 2′-O-methoxyethyl nucleosides, and each of nucleosides 7-16 are β-D-deoxyribonucleosides, wherein the internucleoside linkages between nucleosides 2 to 3, 3 to 4, 4 to 5, 5 to 6, 6 to 7, and 17 to 18 are phosphodiester linkages and the internucleoside linkages between nucleosides 1 to 2, 7 to 8, 8 to 9, 9 to 10, 10 to 11, 11 to 12, 12 to 13, 13 to 14, 14 to 15, 15 to 16, 16 to 17, 18 to 19, and 19 to 20 are phosphorothioate linkages, and wherein each cytosine is a 5-methylcytosine.

[0441] In certain embodiments, Compound No. 1394378 is described by the following chemical notation: Aₑₛ ^{m}Cₑₒ Aₑₒ Gₑₒ ^{m}Cₑₒ Tₑₒ T_{ds} T_{ds} T_{ds} A_{ds} T_{ds} T_{ds} T_{ds} ^{m}C_{ds} ^{m}C_{ds} A_{ds} Tₑₒ Aₑₛ ^{m}Cₑₛ Aₑ (SEQ ID NO: 3646); wherein, A=an adenine, ^{m}C=a 5-methylcytosine, G=a guanine, T=a thymine, e=a 2′-O-methoxyethylribose modified sugar, d=a 2′-deoxyribose sugar moiety, s=a phosphorothioate internucleoside linkage, and o=a phosphodiester internucleoside linkage.

[0442] In certain embodiments, Compound No. 1394378 is described by the following chemical structure, or a pharmaceutically acceptable salt thereof:

[chemical structure]

In certain embodiments, a pharmaceutically acceptable salt of Compound No. 1394378 described by Structure 5 comprises one or more cations selected from sodium, potassium, calcium, and magnesium.

[0443] In certain embodiments, the sodium salt of Compound No. 1394378 is described by the following chemical structure:

[chemical structure]

### VIII. Certain Comparator Compositions

[0444] In certain embodiments, Compound No: 388241, a 5-10-5 MOE gapmer, having a sequence of (from 5′ to 3′) CTCAGTAACATTGACACCAC (incorporated herein as SEQ ID NO: 858), wherein each internucleoside linkage is a phosphorothioate internucleoside linkage, each cytosine is a 5-methylcytosine, and each of nucleosides 1-5 and 16-20 (from 5′ to 3′) comprise a 2′-MOE modified sugar, which was previously described in WO 2011/032045, incorporated herein by reference, is a comparator compound. Compound No. 388241 was selected as a comparator compound because it was one of the most potent compounds described in WO 2011/032045. Compound No. 388241 and Compound No. 443139, also one of the most potent compounds described in WO 2011/032045, were tested in comparative studies and achieved similar results, as described in WO 2011/032045.

[0445] In certain embodiments, compounds described herein, including Compound Nos. 1394371, 1315578, and 1394378, are superior relative to Compound No. 388241 because they demonstrate one or more improved properties, such as, activity and tolerability. Compound Nos. 1394371, 1315578, and 1394378 may be dosed at lower amounts than Compound No. 388241 to achieve a comparable therapeutic effect. Compound Nos. 1394371, 1315578, and 1394378 may be dosed less frequently than Compound No. 388241 to achieve a comparable therapeutic effect.

[0446] For example, as provided in Example 8 (hereinbelow), Compound Nos. 1394371, 1315578, and 1394378 demonstrated improved tolerability in rats relative to that of Compound No. 388241. Compound Nos. 1394371, 1315578, and 1394378 demonstrated 3 h FOB scores of 0.00, 0.50, and 0.00, respectively. In contrast, Compound No. 388241 demonstrated a 3 h FOB score of 2.75. See Tables 77 and 78. Therefore, Compound Nos. 1394371, 1315578, and 1394378 are demonstrably more tolerable than Compound No. 388241 in rats.

[0447] For example, as provided in Example 9 (hereinbelow), Compound Nos. 1394371, 1315578, and 1394378 demonstrated improved activity in human HTT transgenic mice relative to that of Compound No. 388241. Compound Nos. 1394371, 1315578, and 1394378 reduced HTT RNA levels in spinal cords of mice to 26%, 46% and 28% of HTT RNA levels in untreated control mice, respectively, whereas as Compound No. 388241 only reduced HTT RNA levels in spinal cords of mice to 73% of HTT RNA levels in untreated control mice. Compound Nos. 1394371, 1315578, and 1394378 reduced HTT RNA levels in the cortex of mice to 10% of HTT RNA levels in untreated control mice, respectively, whereas as Compound No. 388241 only reduced HTT RNA levels in the cortex of mice to 56% of HTT RNA levels in untreated control mice.

### IX. Certain Hotspot Regions

[0448] In certain embodiments, the ranges described in the Table below comprise hotspot regions. Each hotspot region begins with the nucleobase of SEQ ID NO: 2 identified in the “Start Site SEQ ID NO: 2” column and ends with the nucleobase of SEQ ID NO: 2 identified in the “Stop Site SEQ ID NO: 2” column. In certain embodiments, oligomeric compounds comprise modified oligonucleotides that are complementary within any of the hotspot regions 1-10, as defined in the table below. In certain embodiments, modified oligonucleotides are 16 nucleobases in length. In certain embodiments, modified oligonucleotides are 17 nucleobases in length. In certain embodiments, modified oligonucleotides are 18 nucleobases in length. In certain embodiments, modified oligonucleotides are 20 nucleobases in length.

[0449] In certain embodiments, oligomeric compounds comprise modified oligonucleotides that are gapmers. In certain embodiments, modified oligonucleotides are 5-10-5 MOE gapmers. In certain embodiments, modified oligonucleotides are 6-10-4 MOE gapmers. In certain embodiments, modified oligonucleotides are 5-8-5 MOE gapmers. In certain embodiments, modified oligonucleotides are gapmers, wherein the wings have a cEt/MOE sugar motif. In certain embodiments, modified oligonucleotides have a sugar motif selected from: eekkddddddddkkeee, ekekddddddddkekee, eeeeeddddddddddeeeee, eeeeddddddddkkeee, and eeeeeeddddddddeeee, wherein each “e” is a nucleoside comprising a 2′-MOE sugar moiety, each “k” is a nucleoside comprising a cEt sugar moiety, and each “d” is a nucleoside comprising a 2′-β-D-deoxyribosyl sugar moiety.

[0450] In certain embodiments, oligomeric compounds comprise a modified oligonucleotide comprising a modified internucleoside linkage. In certain embodiments, the modified internucleotides linkage is a phosphorothioate linkage. In certain embodiments, modified oligonucleotides have a internucleoside linkage motif selected from: soosssssssssooss, sooosssssssssssooss, sssssssssssssssssss, sooosssssssssssooos, sossssssssssssssoss, ssoosssssssssssooss, sooosssssssssooss, sooooossssssssssoss, and sossssssssssssoss, wherein each “s” is a phosphorothioate linkage an each “o” is a phosphodiester linkage.

[0451] The nucleobase sequences of the oligomeric compounds in the table below are complementary to SEQ ID NO: 2 within the specified hotspot region. In certain embodiments, compounds comprising a modified oligonucleotide complementary to nucleobases within the hotspot region achieve at least “Min. % Red.” (minimum 0 reduction, relative to untreated control cells) of HTT RNA in the standard in vitro assay, as indicated in the table below. In certain embodiments, modified oligonucleotides complementary to nucleobases within the hotspot region achieve an average of “Avg. % Red.” (average % reduction, relative to untreated control cells) of HTT RNA in the standard in vitro assay, as indicated in the table below. In certain embodiments, modified oligonucleotides complementary to nucleobases within the hotspot region achieve a maximum “Max. % Red.” (maximum % reduction, relative to untreated control cells) of HTT RNA in the standard in vitro assay, as indicated in the table below.

TABLE 1
HTT Hotspots

| | Start | Stop | Min | Max | | | |
|---|---|---|---|---|---|---|---|
| | Site | Site | % | % | Avg % | | |
| | SEQ | SEQ | Red. | Red. | Red. | | SEQ ID |
| Hotspot | ID | ID | In | In | In | Compound No. | NOs in |
| ID | NO: 2 | NO: 2 | vitro | vitro | vitro | in range | range |
| 1 | 56443 | 56500 | 38 | 88 | 72.1 | 1314697, 1314867, | 1184, 1274, |
| | | | | | | 1314999, 1315294, | 1331, 1455, |
| | | | | | | 1315702, 1316563, | 1481, 1562, |
| | | | | | | 1316677 | 1684 |
| 2 | 62833 | 62860 | 83 | 92 | 87.5 | 1391321, 1314907, | 3029, 3104, |
| | | | | | | 1314967, 1391310, | 3557, 3562, |
| | | | | | | 1391323, 1391324, | 3569, 3586, |
| | | | | | | 1391328, 1391336, | 3610, 3620, |
| | | | | | | 1391368, 1394346, | 3622, 3623, |
| | | | | | | 1394375, 1394381, | 3627, 3634, |
| | | | | | | 1394384, 1394385, | 3664, 3687, |
| | | | | | | 1394393, 1394395, | 3692, 3697 |
| | | | | | | 1394422, 1394428, | |
| | | | | | | 1394433, 1394440, | |
| | | | | | | 1394451, 1419391, | |
| | | | | | | 1419396, 1419403, | |
| | | | | | | 1419421 | |
| 3 | 69788 | 69824 | 52 | 86 | 65.8 | 1315412, 1315885, | 2750, 2814, |
| | | | | | | 1315950, 1316385, | 2887, 2991, |
| | | | | | | 1317102 | 3090 |
| 4 | 9984 | 10008 | 52 | 84 | 73.3 | 1314829, 1315347, | 2581, 2640, |
| | | | | | | 1315586, 1316745, | 2736, 2857, |
| | | | | | | 1317017 | 2917 |
| 5 | 106863 | 106924 | 25 | 75 | 57.8 | 1314696, 1315159, | 1105, 1232, |
| | | | | | | 1316117, 1316972, | 1249, 3330, |
| | | | | | | 1317030, 1318565, | 3342, 3344, |
| | | | | | | 1318566, 1318569, | 3362, 3382, |
| | | | | | | 1318573, 1318577, | 3411, 3419, |
| | | | | | | 1318632, 1318634, | 3439, 3456, |
| | | | | | | 1318636, 1318690, | 3475, 3488, |
| | | | | | | 1318691, 1318695, | 3491, 3511, |
| | | | | | | 1318741, 1318745, | 3531, 3550, |
| | | | | | | 1318747 | 3551 |
| 6 | 115297 | 115337 | 65 | 74 | 69.2 | 1315073, 1316061, | 2208, 2310, |
| | | | | | | 1316776, 1317084, | 2335, 2471, |
| | | | | | | 1391292, 1391293, | 3553, 3559, |
| | | | | | | 1391296, 1391299, | 3563, 3565, |
| | | | | | | 1391301, 1391304, | 3570, 3580, |
| | | | | | | 1391314, 1391316, | 3581, 3583, |
| | | | | | | 1391332, 1391333, | 3585, 3589, |
| | | | | | | 1391339, 1391351, | 3593, 3594, |
| | | | | | | 1391353, 1391356, | 3597, 3600, |
| | | | | | | 1391357, 1391364, | 3601, 3604, |
| | | | | | | 1391365, 1391366, | 3614, 3616, |
| | | | | | | 1394343, 1394373, | 3630, 3631, |
| | | | | | | 1394377, 1394382, | 3637, 3648, |
| | | | | | | 1394386, 1394392, | 3650, 3652, |
| | | | | | | 1394394, 1394419, | 3653, 3660, |
| | | | | | | 1394424, 1394441, | 3661, 3662, |
| | | | | | | 1394449, 1419387, | 3684, 3689 |
| | | | | | | 1419393, 1419397, | |
| | | | | | | 1419399, 1419404, | |
| | | | | | | 1419415, 1419416, | |
| | | | | | | 1419418, 1419420, | |
| | | | | | | 1419424 | |
| 7 | 117868 | 117902 | 52 | 86 | 73.7 | 1314540, 1315083, | 2644, 2770, |
| | | | | | | 1316639, 1316648, | 2786, 2916, |
| | | | | | | 1394315, 1394316, | 3574, 3576, |
| | | | | | | 1394317, 1394318, | 3578, 3587, |
| | | | | | | 1394320, 1394321, | 3665, 3666, |
| | | | | | | 1394323, 1394325, | 3667, 3668, |
| | | | | | | 1394326, 1394331, | 3669, 3670, |
| | | | | | | 1394335, 1394336, | 3671, 3672, |
| | | | | | | 1394349, 1394397, | 3673, 3674, |
| | | | | | | 1394398, 1394399, | 3675, 3676, |
| | | | | | | 1394400, 1394401, | 3686, 3694, |
| | | | | | | 1394402, 1394421, | 3698 |
| | | | | | | 1394430, 1394434, | |
| | | | | | | 1394439, 1394447, | |
| | | | | | | 1419408, 1419410, | |
| | | | | | | 1419413, 1419422 | |
| 8 | 119644 | 119670 | 64 | 81 | 72.5 | 1314723, 1316689, | 919, 940, |
| | | | | | | 1456397, 1456398, | 3677, 3678, |
| | | | | | | 1456399, 1456400, | 3679, 3680, |
| | | | | | | 1456401, 1456402, | 3681, 3682, |
| | | | | | | 1456403, 1456404, | 3705, 3706, |
| | | | | | | 1456405, 1456406, | 3707 |
| | | | | | | 1456407, 1456408, | |
| | | | | | | 1456409, 1456410, | |
| | | | | | | 1456411, 1456412, | |
| | | | | | | 1456413 | |
| 9 | 126780 | 126829 | 60 | 87 | 72.1 | 1315214, 1315343, | 1576, 1652, |
| | | | | | | 1315670, 1316310, | 1771, 1813, |
| | | | | | | 1316802, 1316996, | 1933, 1987, |
| | | | | | | 1317163, 1391297, | 2078, 3552, |
| | | | | | | 1391308, 1391311, | 3555, 3558, |
| | | | | | | 1391313, 1391320, | 3560, 3572, |
| | | | | | | 1391329, 1391337, | 3573, 3575, |
| | | | | | | 1391346, 1391348, | 3579, 3584, |
| | | | | | | 1391352, 1391367, | 3598, 3608, |
| | | | | | | 1394345, 1394367, | 3611, 3613, |
| | | | | | | 1394368, 1394371, | 3619, 3628, |
| | | | | | | 1394378, 1394379, | 3635, 3644, |
| | | | | | | 1394387, 1394418, | 3646, 3649, |
| | | | | | | 1394423, 1394425, | 3663, 3683, |
| | | | | | | 1394444, 1394450, | 3688, 3690, |
| | | | | | | 1419360, 1419361, | 3700, 3701, |
| | | | | | | 1419362, 1419365, | 3702, 3703, |
| | | | | | | 1419370, 1419374, | 3704 |
| | | | | | | 1419375, 1419376, | |
| | | | | | | 1419379, 1419380, | |
| | | | | | | 1419383, 1419384, | |
| | | | | | | 1419386, 1419389, | |
| | | | | | | 1419392, 1419394, | |
| | | | | | | 1419406, 1419407, | |
| | | | | | | 1419409, 1419414, | |
| | | | | | | 1419419 | |
| 10 | 130388 | 130418 | 52 | 90 | 68.6 | 444652, 1231536, | 1343, 1406, |
| | | | | | | 1314810, 1315556, | 1539, 3335, |
| | | | | | | 1315878, 1316545, | 3401, 3472, |
| | | | | | | 1316803, 1318652, | 3477, 3519, |
| | | | | | | 1318742 | 3591 |

### X. Certain Pharmaceutical Compositions

[0452] In certain embodiments, described herein are pharmaceutical compositions comprising one or more oligomeric compounds. In certain embodiments, the one or more oligomeric compounds each consists of a modified oligonucleotide. In certain embodiments, the pharmaceutical composition comprises a pharmaceutically acceptable diluent or carrier. In certain embodiments, a pharmaceutical composition comprises or consists of a sterile saline solution and one or more oligomeric compound. In certain embodiments, the sterile saline is pharmaceutical grade saline. In certain embodiments, a pharmaceutical composition comprises or consists of one or more oligomeric compound and sterile water. In certain embodiments, the sterile water is pharmaceutical grade water. In certain embodiments, a pharmaceutical composition comprises or consists of one or more oligomeric compound and phosphate-buffered saline (PBS). In certain embodiments, the sterile PBS is pharmaceutical grade PBS. In certain embodiments, a pharmaceutical composition comprises or consists of one or more oligomeric compound and artificial cerebrospinal fluid (“artificial CSF” or “aCSF”). In certain embodiments, the artificial cerebrospinal fluid is pharmaceutical grade.

[0453] In certain embodiments, a pharmaceutical composition comprises a modified oligonucleotide and artificial cerebrospinal fluid (aCSF). In certain embodiments, a pharmaceutical composition consists of a modified oligonucleotide and artificial cerebrospinal fluid. In certain embodiments, a pharmaceutical composition consists essentially of a modified oligonucleotide and artificial cerebrospinal fluid. In certain embodiments, the artificial cerebrospinal fluid is pharmaceutical grade.

[0454] In certain embodiments, aCSF comprises sodium chloride, potassium chloride, sodium dihydrogen phosphate dihydrate, sodium phosphate dibasic anhydrous, calcium chloride dihydrate, and magnesium chloride hexahydrate. In certain embodiments, the pH of an aCSF solution is modulated with a suitable pH-adjusting agent, for example, with acids such as hydrochloric acid and alkalis such as sodium hydroxide, to a range of from about 7.1-7.3, or to about 7.2.

[0455] In certain embodiments, pharmaceutical compositions comprise one or more oligomeric compound and one or more excipients. In certain embodiments, excipients are selected from water, salt solutions, alcohol, polyethylene glycols, gelatin, lactose, amylase, magnesium stearate, talc, silicic acid, viscous paraffin, hydroxymethylcellulose and polyvinylpyrrolidone.

[0456] In certain embodiments, oligomeric compounds may be admixed with pharmaceutically acceptable active and/or inert substances for the preparation of pharmaceutical compositions or formulations. Compositions and methods for the formulation of pharmaceutical compositions depend on a number of criteria, including, but not limited to, route of administration, extent of disease, or dose to be administered.

[0457] In certain embodiments, pharmaceutical compositions comprising an oligomeric compound encompass any pharmaceutically acceptable salts of the oligomeric compound, esters of the oligomeric compound, or salts of such esters. In certain embodiments, pharmaceutical compositions comprising oligomeric compounds comprising one or more oligonucleotide, upon administration to a subject, including a human, are capable of providing (directly or indirectly) the biologically active metabolite or residue thereof. Accordingly, for example, the disclosure is also drawn to pharmaceutically acceptable salts of oligomeric compounds, prodrugs, pharmaceutically acceptable salts of such prodrugs, and other bioequivalents. In certain embodiments, pharmaceutically acceptable salts comprise inorganic salts, such as monovalent or divalent inorganic salts. Suitable pharmaceutically acceptable salts include, but are not limited to, sodium, potassium, calcium, and magnesium salts. In certain embodiments, prodrugs comprise one or more conjugate group attached to an oligonucleotide, wherein the conjugate group is cleaved by endogenous nucleases within the body.

[0458] In certain embodiments, oligomeric compounds are lyophilized and isolated as sodium salts. In certain embodiments, the sodium salt of an oligomeric compound is mixed with a pharmaceutically acceptable diluent. In certain embodiments, the pharmaceutically acceptable diluent comprises sterile saline, sterile water, PBS, or aCSF. In certain embodiments, the sodium salt of an oligomeric compound is mixed with PBS. In certain embodiments, the sodium salt of an oligomeric compound is mixed with aCSF.

[0459] Lipid moieties have been used in nucleic acid therapies in a variety of methods. In certain such methods, the nucleic acid, such as an oligomeric compound, is introduced into preformed liposomes or lipoplexes made of mixtures of cationic lipids and neutral lipids. In certain methods, DNA complexes with mono- or poly-cationic lipids are formed without the presence of a neutral lipid. In certain embodiments, a lipid moiety is selected to increase distribution of a pharmaceutical agent to a particular cell or tissue. In certain embodiments, a lipid moiety is selected to increase distribution of a pharmaceutical agent to fat tissue. In certain embodiments, a lipid moiety is selected to increase distribution of a pharmaceutical agent to muscle tissue.

[0460] In certain embodiments, pharmaceutical compositions comprise a delivery system. Examples of delivery systems include, but are not limited to, liposomes and emulsions. Certain delivery systems are useful for preparing certain pharmaceutical compositions including those comprising hydrophobic compounds. In certain embodiments, certain organic solvents such as dimethylsulfoxide are used.

[0461] In certain embodiments, pharmaceutical compositions comprise one or more tissue-specific delivery molecules designed to deliver the one or more pharmaceutical agents of the present invention to specific tissues or cell types. For example, in certain embodiments, pharmaceutical compositions include liposomes coated with a tissue-specific antibody.

[0462] In certain embodiments, pharmaceutical compositions comprise a co-solvent system. Certain of such co-solvent systems comprise, for example, benzyl alcohol, a nonpolar surfactant, a water-miscible organic polymer, and an aqueous phase. In certain embodiments, such co-solvent systems are used for hydrophobic compounds. A non-limiting example of such a co-solvent system is the VPD co-solvent system, which is a solution of absolute ethanol comprising 3% w/v benzyl alcohol, 8% w/v of the nonpolar surfactant Polysorbate 80™ and 65% w/v polyethylene glycol 300. The proportions of such co-solvent systems may be varied considerably without significantly altering their solubility and toxicity characteristics. Furthermore, the identity of co-solvent components may be varied: for example, other surfactants may be used instead of Polysorbate 80™; the fraction size of polyethylene glycol may be varied; other biocompatible polymers may replace polyethylene glycol, e.g., polyvinyl pyrrolidone; and other sugars or polysaccharides may substitute for dextrose.

[0463] In certain embodiments, pharmaceutical compositions are prepared for administration by intrathecal injection. In certain embodiments, pharmaceutical compositions are prepared for administration by intracerebroventricular injection. In certain of such embodiments, a pharmaceutical composition comprises a carrier and is formulated in aqueous solution, such as water or physiologically compatible buffers such as Hanks's solution, Ringer's solution, or physiological saline buffer. In certain embodiments, other ingredients are included (e.g., ingredients that aid in solubility or serve as preservatives). In certain embodiments, injectable suspensions are prepared using appropriate liquid carriers, suspending agents and the like. Certain pharmaceutical compositions for injection are presented in unit dosage form, e.g., in ampoules or in multi-dose containers. Certain pharmaceutical compositions for injection are suspensions, solutions or emulsions in oily or aqueous vehicles, and may contain formulatory agents such as suspending, stabilizing and/or dispersing agents. Certain solvents suitable for use in pharmaceutical compositions for injection include, but are not limited to, lipophilic solvents and fatty oils, such as sesame oil, synthetic fatty acid esters, such as ethyl oleate or triglycerides, and liposomes.

[0464] Under certain conditions, certain compounds disclosed herein act as acids. Although such compounds may be drawn or described in protonated (free acid) form, or ionized and in association with a cation (salt) form, aqueous solutions of such compounds exist in equilibrium among such forms. For example, a phosphodiester linkage of an oligonucleotide in aqueous solution exists in equilibrium among free acid, anion and salt forms. Unless otherwise indicated, compounds described herein are intended to include all such forms. Moreover, certain oligonucleotides have several such linkages, each of which is in equilibrium. Thus, oligonucleotides in solution exist in an ensemble of forms at multiple positions all at equilibrium. The term “oligonucleotide” is intended to include all such forms. Drawn structures necessarily depict a single form. Nevertheless, unless otherwise indicated, such drawings are likewise intended to include corresponding forms. Herein, a structure depicting the free acid of a compound followed by the term “or a pharmaceutically acceptable salt thereof” expressly includes all such forms that may be fully or partially protonated/de-protonated/in association with a cation or a combination of cations. In certain embodiments, one or more specific cation is identified. The cations include, but are not limited to, sodium, potassium, calcium, and magnesium. In certain embodiments, a structure depicting the free acid of a compound followed by the term “or a pharmaceutically acceptable salt thereof” expressly includes all such forms that may be fully or partially protonated/de-protonated/in association with one or more cations selected from sodium, potassium, calcium, and magnesium.

[0465] In certain embodiments, modified oligonucleotides or oligomeric compounds are in aqueous solution with sodium. In certain embodiments, modified oligonucleotides or oligomeric compounds are in aqueous solution with potassium. In certain embodiments, modified oligonucleotides or oligomeric compounds are in aqueous solution with phosphate buffered saline (PBS). In certain embodiments, modified oligonucleotides or oligomeric compounds are in aqueous solution with water. In certain such embodiments, the pH of the solution is adjusted with NaOH and/or HCl to achieve a desired pH.

[0466] Herein, certain specific doses are described. A dose may be in the form of a dosage unit. For clarity, a dose (or dosage unit) of a modified oligonucleotide or an oligomeric compound in milligrams indicates the mass of the free acid form of the modified oligonucleotide or oligomeric compound. As described above, in aqueous solution, the free acid is in equilibrium with anionic and salt forms. However, for the purpose of calculating dose, it is assumed that the modified oligonucleotide or oligomeric compound exists as a solvent-free, sodium-acetate free, anhydrous, free acid.

[0467] In certain embodiments, where a modified oligonucleotide or an oligomeric compound is in solution comprising sodium (e.g., saline), the modified oligonucleotide or oligomeric compound may be partially or fully de-protonated and in association with sodium ions. However, the mass of the protons is nevertheless counted toward the weight of the dose, and the mass of the sodium ions is not counted toward the weight of the dose. Thus, for example, a dose, or dosage unit, of 10 mg of Compound No. 1127954, equals the number of fully protonated molecules that weighs 10 mg. This would be equivalent to 10.47 mg of solvent-free, sodium acetate-free, anhydrous sodiated Compound No. 1127954.

[0468] In certain embodiments, where a modified oligonucleotide or oligomeric compound is in a solution, such as aCSF, comprising sodium, potassium, calcium, and magnesium, the modified oligonucleotide or oligomeric compound may be partially or fully de-protonated and in association with sodium, potassium, calcium, and/or magnesium. However, the mass of the protons is nevertheless counted toward the weight of the dose, and the mass of the sodium, potassium, calcium, and magnesium ions is not counted toward the weight of the dose.

[0469] In certain embodiments, when an oligomeric compound comprises a conjugate group, the mass of the conjugate group may be included in calculating the dose of such oligomeric compound. If the conjugate group also has an acid, the conjugate group is likewise assumed to be fully protonated for the purpose of calculating dose.

### Nonlimiting Disclosure and Incorporation by Reference

[0470] Each of the literature and patent publications listed herein is incorporated by reference in its entirety.

[0471] While certain compounds, compositions and methods described herein have been described with specificity in accordance with certain embodiments, the following examples serve only to illustrate the compounds described herein and are not intended to limit the same. Each of the references, GenBank accession numbers, and the like recited in the present application is incorporated herein by reference in its entirety.

[0472] Although the sequence listing accompanying this filing identifies each sequence as either “RNA” or “DNA” as required, in reality, those sequences may be modified with any combination of chemical modifications. One of skill in the art will readily appreciate that such designation as “RNA” or “DNA” to describe modified oligonucleotides is, in certain instances, arbitrary. For example, an oligonucleotide comprising a nucleoside comprising a 2′-OH sugar moiety and a thymine base could be described as a DNA having a modified sugar (2′-OH in place of one 2′-H of DNA) or as an RNA having a modified base (thymine (methylated uracil) in place of a uracil of RNA). Accordingly, nucleic acid sequences provided herein, including, but not limited to those in the sequence listing, are intended to encompass nucleic acids containing any combination of natural or modified RNA and/or DNA, including, but not limited to such nucleic acids having modified nucleobases. By way of further example and without limitation, an oligomeric compound having the nucleobase sequence “ATCGATCG” encompasses any oligomeric compounds having such nucleobase sequence, whether modified or unmodified, including, but not limited to, such compounds comprising RNA bases, such as those having sequence “AUCGAUCG” and those having some DNA bases and some RNA bases such as “AUCGATCG” and oligomeric compounds having other modified nucleobases, such as “AT^{m}CGAUCG,” wherein ^{m}C indicates a cytosine base comprising a methyl group at the 5-position.

[0473] Certain compounds described herein (e.g., modified oligonucleotides) have one or more asymmetric center and thus give rise to enantiomers, diastereomers, and other stereoisomeric configurations that may be defined, in terms of absolute stereochemistry, as (R) or (S), as a or f such as for sugar anomers, or as (D) or (L), such as for amino acids, etc. Compounds provided herein that are drawn or described as having certain stereoisomeric configurations include only the indicated compounds. Compounds provided herein that are drawn or described with undefined stereochemistry include all such possible isomers, including their stereorandom and optically pure forms, unless specified otherwise. Likewise, tautomeric forms of the compounds herein are also included unless otherwise indicated. Unless otherwise indicated, compounds described herein are intended to include corresponding salt forms.

[0474] The compounds described herein include variations in which one or more atoms are replaced with a non-radioactive isotope or radioactive isotope of the indicated element. For example, compounds herein that comprise hydrogen atoms encompass all possible deuterium substitutions for each of the ¹H hydrogen atoms. Isotopic substitutions encompassed by the compounds herein include but are not limited to: ²H or ³H in place of ¹H, ¹³C or ¹⁴C in place of ²C, ¹⁵N in place of ¹⁴N, ¹⁷O or ¹⁸O in place of ¹⁶O, and ³³S, ³⁴S, ³⁵S or ³⁶S in place of ³²S. In certain embodiments, non-radioactive isotopic substitutions may impart new properties on the oligomeric compound that are beneficial for use as a therapeutic or research tool. In certain embodiments, radioactive isotopic substitutions may make the compound suitable for research or diagnostic purposes such as imaging.

### EXAMPLES

[0475] The following examples illustrate certain embodiments of the present disclosure and are not limiting. Moreover, where specific embodiments are provided, the inventors have contemplated generic application of those specific embodiments. For example, disclosure of an oligonucleotide having a particular motif provides reasonable support for additional oligonucleotides having the same or similar motif And, for example, where a particular high-affinity modification appears at a particular position, other high-affinity modifications at the same position are considered suitable, unless otherwise indicated.

### Example 1: Effect of Mixed MOE and cEt, Mixed Backbone Modified Oligonucleotides on Human HTT RNA In Vitro, Single Dose

[0476] Modified oligonucleotides complementary to human HTT nucleic acid were designed and tested for their single dose effects on HTT RNA in vitro. The modified oligonucleotides were tested in a series of experiments under the culture conditions indicated in the tables below.

[0477] The modified oligonucleotides in the tables below are 17 nucleosides in length, wherein the sugar motif for the gapmers is (from 5′ to 3′): eekkddddddddkkeee; wherein each “d” represents a 2′-β-D-deoxyribosyl sugar, each “e” represents a 2′-MOE sugar moiety, and each “k” represents a cEt sugar moiety. The internucleoside linkage motif for the gapmers is (from 5′ to 3′): soosssssssssooss; wherein each “o” represents a phosphodiester internucleoside linkage, and each “s” represents a phosphorothioate internucleoside linkage. Each cytosine residue is a 5-methylcytosine.

[0478] “Start site” indicates the 5′-most nucleoside to which the modified oligonucleotide is complementary in the target nucleic acid sequence. “Stop site” indicates the 3′-most nucleoside to which the modified oligonucleotide is complementary in the target nucleic acid sequence. Each modified oligonucleotide listed in the tables below is 100% complementary to SEQ ID NO: 1 (GENBANK Accession No. NM_002111.6), to SEQ ID NO: 2 (GENBANK Accession No. NT_006081.17, truncated from 462000 to 634000), or to both. ‘N/A’ indicates that the modified oligonucleotide is not 100% complementary to that particular target nucleic acid sequence.

[0479] Cultured HepG2 or Hep3B cells were treated with modified oligonucleotide at a concentration of 2000 nM by electroporation at a density of 20,000 cells per well. After a treatment period of approximately 24 hours, total RNA was isolated from the cells and HTT RNA levels were measured by quantitative real-time RTPCR. HTT RNA levels were measured by human primer probe set RTS2617 (forward sequence CTCCGTCCGGTAGACATGCT, designated herein as SEQ ID NO: 11; reverse sequence GGAAATCAGAACCCTCAAAATGG, designated herein as SEQ ID NO: 12; probe sequence TGAGCACTGTTCAACTGTGGATATCGGGA, designated herein as SEQ ID NO: 13). HTT RNA levels were normalized to total RNA content, as measured by RIBOGREEN®. Reduction of HTT RNA is presented in the tables below as percent HTT RNA relative to the amount of the HTT RNA in untreated control cells (% UTC). Each table represents results from an individual assay plate.

TABLE 2
Reduction of HTT RNA by modified oligonucleotides with a mixed MOE/cEt sugar motif
and mixed PO/PS internucleoside linkages in HepG2 cells

| | SEQ | SEQ | SEQ | SEQ | | | |
|---|---|---|---|---|---|---|---|
| | ID No: | ID No: | ID No: | ID No: | | HTT | SEQ |
| Compound | 1 Start | 1 Stop | 2 Start | 2 Stop | | (% | ID |
| Number | Site | Site | Site | Site | Sequence (5′ to 3′) | UTC) | NO |
| 646201 | N/A | N/A | 896 | 912 | GGCCAGCATGATTGACA | 113 | 26 |
| 646202 | N/A | N/A | 900 | 916 | CGCCGGCCAGCATGATT | 94 | 27 |
| 646203 | N/A | N/A | 904 | 920 | GCCACGCCGGCCAGCAT | 77 | 28 |
| 646204 | N/A | N/A | 921 | 937 | GCGCCGGCGGAGGCGGG | 75 | 29 |
| | | | 941 | 957 | | | |
| 646205 | N/A | N/A | 922 | 938 | CGCGCCGGCGGAGGCGG | 89 | 30 |
| 646206 | N/A | N/A | 926 | 942 | GGGCCGCGCCGGCGGAG | 91 | 31 |
| 646207 | N/A | N/A | 944 | 960 | GCTGCGCCGGCGGAGGC | 70 | 32 |
| 646208 | 47 | 63 | 1032 | 1048 | GCTCTGGGCCGCAGGTA | 56 | 33 |
| 646209 | 181 | 197 | 1166 | 1182 | GGAAGGACTTGAGGGAC | 67 | 34 |
| 646210 | 185 | 201 | 1170 | 1186 | TGCTGGAAGGACTTGAG | 34 | 35 |
| 646211 | 189 | 205 | 1174 | 1190 | CTGCTGCTGGAAGGACT | 23 | 36 |
| 646212 | 254 | 270 | 1233 | 1249 | GGCGGCTGTTGCTGCTG | 46 | 37 |
| 646213 | 262 | 278 | 1241 | 1257 | GCGGCGGTGGCGGCTGT | 81 | 38 |
| 646214 | 284 | 300 | 1263 | 1279 | TGAGGAGGCGGCGGCGG | 40 | 39 |
| 646215 | 288 | 304 | 1267 | 1283 | AAGCTGAGGAGGCGGCG | 45 | 40 |
| 646216 | 292 | 308 | 1271 | 1287 | GAGGAAGCTGAGGAGGC | 54 | 41 |
| 646217 | 296 | 312 | 1275 | 1291 | GGCTGAGGAAGCTGAGG | 52 | 42 |
| 646218 | 300 | 316 | 1279 | 1295 | CGGCGGCTGAGGAAGCT | 24 | 43 |
| 646219 | 304 | 320 | 1283 | 1299 | GCGGCGGCGGCTGAGGA | 26 | 44 |
| 646220 | 308 | 324 | 1287 | 1303 | GCCTGCGGCGGCGGCTG | 61 | 45 |
| 646221 | 312 | 328 | 1291 | 1307 | CTGTGCCTGCGGCGGCG | 31 | 46 |
| 646222 | 316 | 332 | 1295 | 1311 | GCGGCTGTGCCTGCGGC | 36 | 47 |
| 646223 | 320 | 336 | 1299 | 1315 | AGCAGCGGCTGTGCCTG | 64 | 48 |
| 646224 | 324 | 340 | 1303 | 1319 | AGGCAGCAGCGGCTGTG | 76 | 49 |
| 646225 | 328 | 344 | 1307 | 1323 | GCTGAGGCAGCAGCGGC | 63 | 50 |
| 646226 | 332 | 348 | 1311 | 1327 | TGCGGCTGAGGCAGCAG | 82 | 51 |
| 646227 | 336 | 352 | 1315 | 1331 | CGGCTGCGGCTGAGGCA | 48 | 52 |
| 646228 | 378 | 394 | 1357 | 1373 | AGCCACAGCCGGGCCGG | 108 | 53 |
| 646229 | 382 | 398 | 1361 | 1377 | CCTCAGCCACAGCCGGG | 87 | 54 |
| 646230 | N/A | N/A | 1402 | 1418 | GGAGCTGCAGCGGGCCC | 90 | 55 |
| 646231 | N/A | N/A | 1424 | 1440 | AGCCTGGGACCCGCCGG | 67 | 56 |
| 646232 | N/A | N/A | 1425 | 1441 | TAGCCTGGGACCCGCCG | 76 | 57 |
| 646233 | N/A | N/A | 1426 | 1442 | GTAGCCTGGGACCCGCC | 68 | 58 |
| 646234 | N/A | N/A | 1427 | 1443 | CGTAGCCTGGGACCCGC | 59 | 59 |
| 646235 | N/A | N/A | 1428 | 1444 | CCGTAGCCTGGGACCCG | 74 | 60 |
| 646236 | N/A | N/A | 1429 | 1445 | GCCGTAGCCTGGGACCC | 83 | 61 |
| 646237 | N/A | N/A | 1430 | 1446 | CGCCGTAGCCTGGGACC | 80 | 62 |
| 646238 | N/A | N/A | 1431 | 1447 | CCGCCGTAGCCTGGGAC | 71 | 63 |
| 646239 | N/A | N/A | 1432 | 1448 | CCCGCCGTAGCCTGGGA | 95 | 64 |
| 646240 | N/A | N/A | 1433 | 1449 | CCCCGCCGTAGCCTGGG | 96 | 65 |
| 646241 | N/A | N/A | 1434 | 1450 | TCCCCGCCGTAGCCTGG | 78 | 66 |
| 646242 | N/A | N/A | 1435 | 1451 | ATCCCCGCCGTAGCCTG | 88 | 67 |
| 646243 | N/A | N/A | 1436 | 1452 | CATCCCCGCCGTAGCCT | 72 | 68 |
| 646244 | N/A | N/A | 1438 | 1454 | GCCATCCCCGCCGTAGC | 65 | 69 |
| 646245 | N/A | N/A | 1439 | 1455 | CGCCATCCCCGCCGTAG | 101 | 70 |
| 646246 | N/A | N/A | 1440 | 1456 | CCGCCATCCCCGCCGTA | 110 | 71 |
| 646247 | N/A | N/A | 1441 | 1457 | ACCGCCATCCCCGCCGT | 97 | 72 |
| 646248 | N/A | N/A | 1442 | 1458 | TACCGCCATCCCCGCCG | 77 | 73 |
| 646249 | N/A | N/A | 1443 | 1459 | TTACCGCCATCCCCGCC | 72 | 74 |
| 646250 | N/A | N/A | 1444 | 1460 | GTTACCGCCATCCCCGC | 91 | 75 |
| 646251 | N/A | N/A | 1445 | 1461 | GGTTACCGCCATCCCCG | 72 | 76 |
| 646252 | N/A | N/A | 1446 | 1462 | GGGTTACCGCCATCCCC | 83 | 77 |
| 646253 | N/A | N/A | 1447 | 1463 | AGGGTTACCGCCATCCC | 86 | 78 |
| 646254 | N/A | N/A | 1448 | 1464 | CAGGGTTACCGCCATCC | 53 | 79 |
| 646255 | N/A | N/A | 1449 | 1465 | GCAGGGTTACCGCCATC | 96 | 80 |
| 646256 | N/A | N/A | 1450 | 1466 | TGCAGGGTTACCGCCAT | 91 | 81 |
| 646257 | N/A | N/A | 1452 | 1468 | GCTGCAGGGTTACCGCC | 81 | 82 |
| 646258 | N/A | N/A | 1453 | 1469 | GGCTGCAGGGTTACCGC | 71 | 83 |
| 646259 | N/A | N/A | 1454 | 1470 | AGGCTGCAGGGTTACCG | 35 | 84 |
| 646260 | N/A | N/A | 1531 | 1547 | GCGGGTGTCCCTCATGG | 98 | 85 |
| 646261 | N/A | N/A | 1634 | 1650 | GGACAGGCCCCAACAAG | 92 | 86 |
| 646262 | N/A | N/A | 1637 | 1653 | TCAGGACAGGCCCCAAC | 63 | 87 |
| 646263 | N/A | N/A | 1640 | 1656 | AATTCAGGACAGGCCCC | 61 | 88 |
| 646264 | N/A | N/A | 1643 | 1659 | GTGAATTCAGGACAGGC | 41 | 89 |
| 646265 | N/A | N/A | 1646 | 1662 | TCGGTGAATTCAGGACA | 30 | 90 |
| 646266 | N/A | N/A | 1649 | 1665 | CCCTCGGTGAATTCAGG | 51 | 91 |
| 646267 | N/A | N/A | 1652 | 1668 | CTCCCCTCGGTGAATTC | 69 | 92 |
| 646268 | N/A | N/A | 1655 | 1671 | TGACTCCCCTCGGTGAA | 89 | 93 |
| 646269 | N/A | N/A | 1658 | 1674 | CCGTGACTCCCCTCGGT | 70 | 94 |
| 646270 | N/A | N/A | 1661 | 1677 | AGGCCGTGACTCCCCTC | 87 | 95 |
| 646271 | N/A | N/A | 1664 | 1680 | CTGAGGCCGTGACTCCC | 69 | 96 |
| 646272 | N/A | N/A | 1667 | 1683 | GGGCTGAGGCCGTGACT | 56 | 97 |
| 646273 | N/A | N/A | 1670 | 1686 | AGAGGGCTGAGGCCGTG | 80 | 98 |
| 646274 | N/A | N/A | 1673 | 1689 | GCGAGAGGGCTGAGGCC | 78 | 99 |
| 646275 | N/A | N/A | 1682 | 1698 | CTGCGAAGGGCGAGAGG | 97 | 100 |
| 646276 | N/A | N/A | 1685 | 1701 | ATCCTGCGAAGGGCGAG | 76 | 101 |
| 646277 | N/A | N/A | 1688 | 1704 | CGCATCCTGCGAAGGGC | 88 | 102 |
| 646278 | N/A | N/A | 1691 | 1707 | CTTCGCATCCTGCGAAG | 107 | 103 |

TABLE 3
Reduction of HTT RNA by modified oligonucleotides with a mixed MOE/cEt sugar motif
and mixed PO/PS internucleoside linkages in Hep3B cells

| | SEQ | SEQ | SEQ | SEQ | | | |
|---|---|---|---|---|---|---|---|
| | ID No: | ID No: | ID No: | ID No: | | HTT | SEQ |
| Compound | 1 Start | 1 Stop | 2 Start | 2 Stop | | (% | ID |
| Number | Site | Site | Site | Site | Sequence (5′ to 3′) | UTC) | NO |
| 646253 | N/A | N/A | 1447 | 1463 | AGGGTTACCGCCATCCC | 78 | 78 |
| 646279 | N/A | N/A | 1694 | 1710 | ACTCTTCGCATCCTGCG | 67 | 104 |
| 646280 | N/A | N/A | 1697 | 1713 | CCAACTCTTCGCATCCT | 87 | 105 |
| 646281 | N/A | N/A | 1700 | 1716 | GCCCCAACTCTTCGCAT | 93 | 106 |
| 646282 | N/A | N/A | 1703 | 1719 | CTCGCCCCAACTCTTCG | 86 | 107 |
| 646283 | N/A | N/A | 1706 | 1722 | GTTCTCGCCCCAACTCT | 65 | 108 |
| 646284 | N/A | N/A | 1709 | 1725 | CAAGTTCTCGCCCCAAC | 38 | 109 |
| 646285 | N/A | N/A | 1712 | 1728 | AAACAAGTTCTCGCCCC | 65 | 110 |
| 646286 | N/A | N/A | 1715 | 1731 | AAGAAACAAGTTCTCGC | 75 | 111 |
| 646287 | N/A | N/A | 1725 | 1741 | CGCAAATAAAAAGAAAC | 47 | 112 |
| 646288 | N/A | N/A | 1728 | 1744 | TCTCGCAAATAAAAAGA | 70 | 113 |
| 646289 | N/A | N/A | 1731 | 1747 | GTTTCTCGCAAATAAAA | 59 | 114 |
| 646290 | N/A | N/A | 1734 | 1750 | CTGGTTTCTCGCAAATA | 59 | 115 |
| 646291 | N/A | N/A | 1737 | 1753 | GCCCTGGTTTCTCGCAA | 71 | 116 |
| 646292 | N/A | N/A | 1740 | 1756 | CCCGCCCTGGTTTCTCG | 64 | 117 |
| 646293 | N/A | N/A | 1743 | 1759 | ACCCCCGCCCTGGTTTC | 81 | 118 |
| 646294 | N/A | N/A | 1746 | 1762 | AGAACCCCCGCCCTGGT | 74 | 119 |
| 646295 | N/A | N/A | 1749 | 1765 | AAAAGAACCCCCGCCCT | 112 | 120 |
| 646296 | N/A | N/A | 1752 | 1768 | GTTAAAAGAACCCCCGC | 124 | 121 |
| 646297 | N/A | N/A | 1755 | 1771 | GCAGTTAAAAGAACCCC | 54 | 122 |
| 646298 | N/A | N/A | 1758 | 1774 | AACGCAGTTAAAAGAAC | 90 | 123 |
| 646299 | N/A | N/A | 1761 | 1777 | CACAACGCAGTTAAAAG | 90 | 124 |
| 646300 | N/A | N/A | 1764 | 1780 | CTTCACAACGCAGTTAA | 74 | 125 |
| 646301 | N/A | N/A | 1767 | 1783 | TCTCTTCACAACGCAGT | 43 | 126 |
| 646302 | N/A | N/A | 1770 | 1786 | AGTTCTCTTCACAACGC | 82 | 127 |
| 646303 | N/A | N/A | 1773 | 1789 | CCAAGTTCTCTTCACAA | 59 | 128 |
| 646304 | N/A | N/A | 1776 | 1792 | CCTCCAAGTTCTCTTCA | 85 | 129 |
| 646305 | N/A | N/A | 1779 | 1795 | GCTCCTCCAAGTTCTCT | 75 | 130 |
| 646306 | N/A | N/A | 1782 | 1798 | TCGGCTCCTCCAAGTTC | 84 | 131 |
| 646307 | N/A | N/A | 1785 | 1801 | ATCTCGGCTCCTCCAAG | 53 | 132 |
| 646308 | N/A | N/A | 1788 | 1804 | CAAATCTCGGCTCCTCC | 71 | 133 |
| 646309 | N/A | N/A | 1791 | 1807 | GAGCAAATCTCGGCTCC | 78 | 134 |
| 646310 | N/A | N/A | 1794 | 1810 | ACTGAGCAAATCTCGGC | 79 | 135 |
| 646311 | N/A | N/A | 1797 | 1813 | GGCACTGAGCAAATCTC | 39 | 136 |
| 646312 | N/A | N/A | 1800 | 1816 | AGTGGCACTGAGCAAAT | 58 | 137 |
| 646313 | N/A | N/A | 1803 | 1819 | GGAAGTGGCACTGAGCA | 46 | 138 |
| 646314 | N/A | N/A | 1806 | 1822 | GAGGGAAGTGGCACTGA | 82 | 139 |
| 646315 | N/A | N/A | 1809 | 1825 | GAAGAGGGAAGTGGCAC | 81 | 140 |
| 646316 | N/A | N/A | 1812 | 1828 | CTAGAAGAGGGAAGTGG | 100 | 141 |
| 646317 | N/A | N/A | 1815 | 1831 | AGACTAGAAGAGGGAAG | 103 | 142 |
| 646318 | N/A | N/A | 1818 | 1834 | CTCAGACTAGAAGAGGG | 108 | 143 |
| 646319 | N/A | N/A | 1821 | 1837 | CCTCTCAGACTAGAAGA | 104 | 144 |
| 646320 | N/A | N/A | 1824 | 1840 | TTCCCTCTCAGACTAGA | 81 | 145 |
| 646321 | N/A | N/A | 1827 | 1843 | CTCTTCCCTCTCAGACT | 103 | 146 |
| 646322 | N/A | N/A | 1830 | 1846 | GCCCTCTTCCCTCTCAG | 85 | 147 |
| 646323 | N/A | N/A | 1838 | 1854 | CGCCCCCAGCCCTCTTC | 93 | 148 |
| 646324 | N/A | N/A | 1841 | 1857 | CCGCGCCCCCAGCCCTC | 82 | 149 |
| 646325 | N/A | N/A | 1844 | 1860 | GTCCCGCGCCCCCAGCC | 92 | 150 |
| 646326 | N/A | N/A | 1847 | 1863 | AGTGTCCCGCGCCCCCA | 58 | 151 |
| 646327 | N/A | N/A | 1850 | 1866 | CGAAGTGTCCCGCGCCC | 59 | 152 |
| 646328 | N/A | N/A | 1853 | 1869 | TCTCGAAGTGTCCCGCG | 95 | 153 |
| 646329 | N/A | N/A | 1856 | 1872 | TCCTCTCGAAGTGTCCC | 64 | 154 |
| 646330 | N/A | N/A | 1859 | 1875 | GCCTCCTCTCGAAGTGT | 69 | 155 |
| 646331 | N/A | N/A | 1862 | 1878 | CCCGCCTCCTCTCGAAG | 75 | 156 |
| 646332 | N/A | N/A | 1865 | 1881 | AACCCCGCCTCCTCTCG | 65 | 157 |
| 646333 | N/A | N/A | 1868 | 1884 | CCAAACCCCGCCTCCTC | 71 | 158 |
| 646334 | N/A | N/A | 1871 | 1887 | GCTCCAAACCCCGCCTC | 76 | 159 |
| 646335 | N/A | N/A | 1874 | 1890 | CCAGCTCCAAACCCCGC | 59 | 160 |
| 646336 | N/A | N/A | 1877 | 1893 | TCTCCAGCTCCAAACCC | 101 | 161 |
| 646337 | N/A | N/A | 1880 | 1896 | ATCTCTCCAGCTCCAAA | 67 | 162 |
| 646338 | N/A | N/A | 1883 | 1899 | CACATCTCTCCAGCTCC | 66 | 163 |
| 646339 | N/A | N/A | 1889 | 1905 | TGCCCCCACATCTCTCC | 71 | 164 |
| 646340 | N/A | N/A | 1892 | 1908 | CACTGCCCCCACATCTC | 67 | 165 |
| 646341 | N/A | N/A | 1895 | 1911 | ATCCACTGCCCCCACAT | 89 | 166 |
| 646342 | N/A | N/A | 1898 | 1914 | GTCATCCACTGCCCCCA | 44 | 167 |
| 646343 | N/A | N/A | 1901 | 1917 | TATGTCATCCACTGCCC | 54 | 168 |
| 646344 | N/A | N/A | 1907 | 1923 | AAGCATTATGTCATCCA | 29 | 169 |
| 646345 | N/A | N/A | 1910 | 1926 | TAAAAGCATTATGTCAT | 67 | 170 |
| 646346 | N/A | N/A | 1913 | 1929 | TCCTAAAAGCATTATGT | 97 | 171 |
| 646347 | N/A | N/A | 1930 | 1946 | CCACTCCCGCCGAGGCG | 74 | 172 |
| 646348 | N/A | N/A | 1933 | 1949 | CCGCCACTCCCGCCGAG | 71 | 173 |
| 646349 | N/A | N/A | 1936 | 1952 | GCCCCGCCACTCCCGCC | 80 | 174 |
| 646350 | N/A | N/A | 1939 | 1955 | CCTGCCCCGCCACTCCC | 78 | 175 |
| 646351 | N/A | N/A | 1947 | 1963 | GCCCCCCCCCTGCCCCG | 82 | 176 |
| 646352 | N/A | N/A | 1952 | 1968 | TCCCCGCCCCCCCCCTG | 109 | 177 |
| 646353 | N/A | N/A | 1955 | 1971 | CACTCCCCGCCCCCCCC | 68 | 178 |
| 646354 | N/A | N/A | 1960 | 1976 | GCCCTCACTCCCCGCCC | 79 | 179 |
| 646355 | N/A | N/A | 1963 | 1979 | CGCGCCCTCACTCCCCG | 92 | 180 |

TABLE 4
Reduction of HTT RNA by modified oligonucleotides with a mixed MOE/cEt sugar motif
and mixed PO/PS internucleoside linkages in HepG2 cells

| | SEQ | SEQ | SEQ | SEQ | | | |
|---|---|---|---|---|---|---|---|
| | ID No: | ID No: | ID No: | ID No: | | HTT | SEQ |
| Compound | 1 Start | 1 Stop | 2 Start | 2 Stop | | (% | ID |
| Number | Site | Site | Site | Site | Sequence (5′ to 3′) | UTC) | NO |
| 646253 | N/A | N/A | 1447 | 1463 | AGGGTTACCGCCATCCC | 65 | 78 |
| 646356 | N/A | N/A | 1969 | 1985 | ATTGGACGCGCCCTCAC | 38 | 181 |
| 646357 | N/A | N/A | 1972 | 1988 | CCCATTGGACGCGCCCT | 54 | 182 |
| 646358 | N/A | N/A | 1975 | 1991 | TCTCCCATTGGACGCGC | 69 | 183 |
| 646359 | N/A | N/A | 1981 | 1997 | AAGAAATCTCCCATTGG | 55 | 184 |
| 646360 | N/A | N/A | 1984 | 2000 | GAAAAGAAATCTCCCAT | 58 | 185 |
| 646361 | N/A | N/A | 1987 | 2003 | TAGGAAAAGAAATCTCC | 87 | 186 |
| 646362 | N/A | N/A | 1990 | 2006 | CACTAGGAAAAGAAATC | 113 | 187 |
| 646363 | N/A | N/A | 1993 | 2009 | TGCCACTAGGAAAAGAA | 90 | 188 |
| 646364 | N/A | N/A | 1996 | 2012 | AAGTGCCACTAGGAAAA | 33 | 189 |
| 646365 | N/A | N/A | 1999 | 2015 | TTTAAGTGCCACTAGGA | 52 | 190 |
| 646366 | N/A | N/A | 2002 | 2018 | TGTTTTAAGTGCCACTA | 39 | 191 |
| 646367 | N/A | N/A | 2005 | 2021 | GGCTGTTTTAAGTGCCA | 68 | 192 |
| 646368 | N/A | N/A | 2008 | 2024 | TCAGGCTGTTTTAAGTG | 69 | 193 |
| 646369 | N/A | N/A | 2011 | 2027 | ATCTCAGGCTGTTTTAA | 70 | 194 |
| 646370 | N/A | N/A | 2014 | 2030 | CAAATCTCAGGCTGTTT | 28 | 195 |
| 646371 | N/A | N/A | 2017 | 2033 | CCTCAAATCTCAGGCTG | 59 | 196 |
| 646372 | N/A | N/A | 2020 | 2036 | GAGCCTCAAATCTCAGG | 53 | 197 |
| 646373 | N/A | N/A | 2023 | 2039 | GAAGAGCCTCAAATCTC | 58 | 198 |
| 646374 | N/A | N/A | 2026 | 2042 | TAGGAAGAGCCTCAAAT | 64 | 199 |
| 646375 | N/A | N/A | 2029 | 2045 | ATGTAGGAAGAGCCTCA | 50 | 200 |
| 646376 | N/A | N/A | 2032 | 2048 | ACAATGTAGGAAGAGCC | 31 | 201 |
| 646377 | N/A | N/A | 2035 | 2051 | CTGACAATGTAGGAAGA | 44 | 202 |
| 646378 | N/A | N/A | 2038 | 2054 | GTCCTGACAATGTAGGA | 77 | 203 |
| 646379 | N/A | N/A | 2041 | 2057 | AATGTCCTGACAATGTA | 44 | 204 |
| 646380 | N/A | N/A | 2044 | 2060 | TGAAATGTCCTGACAAT | 56 | 205 |
| 646381 | N/A | N/A | 2047 | 2063 | AAATGAAATGTCCTGAC | 47 | 206 |
| 646382 | N/A | N/A | 2050 | 2066 | ACTAAATGAAATGTCCT | 48 | 207 |
| 646383 | N/A | N/A | 2057 | 2073 | ATCATGAACTAAATGAA | 84 | 208 |
| 646384 | N/A | N/A | 2060 | 2076 | GTGATCATGAACTAAAT | 37 | 209 |
| 646385 | N/A | N/A | 2063 | 2079 | ACCGTGATCATGAACTA | 43 | 210 |
| 646386 | N/A | N/A | 2066 | 2082 | ACCACCGTGATCATGAA | 46 | 211 |
| 646387 | N/A | N/A | 2069 | 2085 | ACTACCACCGTGATCAT | 66 | 212 |
| 646388 | N/A | N/A | 2072 | 2088 | GTTACTACCACCGTGAT | 86 | 213 |
| 646389 | N/A | N/A | 2075 | 2091 | CGTGTTACTACCACCGT | 50 | 214 |
| 646390 | N/A | N/A | 2090 | 2106 | GGTGGTGCTTAAAATCG | 74 | 215 |
| 646391 | N/A | N/A | 2093 | 2109 | TTAGGTGGTGCTTAAAA | 85 | 216 |
| 646392 | N/A | N/A | 2096 | 2112 | CTCTTAGGTGGTGCTTA | 60 | 217 |
| 646393 | N/A | N/A | 2099 | 2115 | GATCTCTTAGGTGGTGC | 53 | 218 |
| 646394 | N/A | N/A | 2102 | 2118 | GCAGATCTCTTAGGTGG | 53 | 219 |
| 646395 | N/A | N/A | 2105 | 2121 | TGAGCAGATCTCTTAGG | 58 | 220 |
| 646396 | N/A | N/A | 2111 | 2127 | CTTAGATGAGCAGATCT | 55 | 221 |
| 646397 | N/A | N/A | 2114 | 2130 | AGGCTTAGATGAGCAGA | 68 | 222 |
| 646398 | N/A | N/A | 2120 | 2136 | CAACTTAGGCTTAGATG | 35 | 223 |
| 646399 | N/A | N/A | 2126 | 2142 | GCAGACCAACTTAGGCT | 53 | 224 |
| 646400 | N/A | N/A | 2129 | 2145 | CCTGCAGACCAACTTAG | 67 | 225 |
| 646401 | N/A | N/A | 2132 | 2148 | ACGCCTGCAGACCAACT | 31 | 226 |
| 646402 | N/A | N/A | 2145 | 2161 | ACAACTCATTCAAACGC | 62 | 227 |
| 646403 | N/A | N/A | 2148 | 2164 | ACCACAACTCATTCAAA | 67 | 228 |
| 646404 | N/A | N/A | 2151 | 2167 | GCAACCACAACTCATTC | 40 | 229 |
| 646405 | N/A | N/A | 2154 | 2170 | TTGGCAACCACAACTCA | 63 | 230 |
| 646406 | N/A | N/A | 2157 | 2173 | TACTTGGCAACCACAAC | 53 | 231 |
| 646407 | N/A | N/A | 2160 | 2176 | CTTTACTTGGCAACCAC | 44 | 232 |
| 646408 | N/A | N/A | 2166 | 2182 | TCACCACTTTACTTGGC | 48 | 233 |
| 646409 | N/A | N/A | 2169 | 2185 | AGTTCACCACTTTACTT | 99 | 234 |
| 646410 | N/A | N/A | 2172 | 2188 | GTAAGTTCACCACTTTA | 75 | 235 |
| 646411 | N/A | N/A | 2188 | 2204 | TTTCATTAATCACCACG | 21 | 236 |
| 646412 | N/A | N/A | 2191 | 2207 | TAATTTCATTAATCACC | 30 | 237 |
| 646413 | N/A | N/A | 2194 | 2210 | AGATAATTTCATTAATC | 78 | 238 |
| 646414 | N/A | N/A | 2197 | 2213 | TTAAGATAATTTCATTA | 81 | 239 |
| 646415 | N/A | N/A | 2205 | 2221 | CCTAATATTTAAGATAA | 82 | 240 |
| 646416 | N/A | N/A | 2208 | 2224 | CTTCCTAATATTTAAGA | 88 | 241 |
| 646417 | N/A | N/A | 2211 | 2227 | ACTCTTCCTAATATTTA | 80 | 242 |
| 646418 | N/A | N/A | 2214 | 2230 | TCAACTCTTCCTAATAT | 72 | 243 |
| 646419 | N/A | N/A | 2217 | 2233 | CAATCAACTCTTCCTAA | 85 | 244 |
| 646420 | N/A | N/A | 2220 | 2236 | CTTCAATCAACTCTTCC | 47 | 245 |
| 646421 | N/A | N/A | 2223 | 2239 | AAACTTCAATCAACTCT | 50 | 246 |
| 646422 | N/A | N/A | 2226 | 2242 | AAAAAACTTCAATCAAC | 58 | 247 |
| 646423 | N/A | N/A | 2229 | 2245 | GGCAAAAAACTTCAATC | 46 | 248 |
| 646424 | N/A | N/A | 2232 | 2248 | ATAGGCAAAAAACTTCA | 66 | 249 |
| 646425 | N/A | N/A | 2235 | 2251 | CACATAGGCAAAAAACT | 82 | 250 |
| 646426 | N/A | N/A | 2239 | 2255 | AACACACATAGGCAAAA | 75 | 251 |
| 646427 | N/A | N/A | 2242 | 2258 | CCCAACACACATAGGCA | 44 | 252 |
| 646428 | N/A | N/A | 2245 | 2261 | ATTCCCAACACACATAG | 87 | 253 |
| 646429 | N/A | N/A | 2248 | 2264 | TTTATTCCCAACACACA | 81 | 254 |
| 646430 | N/A | N/A | 2251 | 2267 | GGTTTTATTCCCAACAC | 95 | 255 |
| 646431 | N/A | N/A | 2254 | 2270 | GTTGGTTTTATTCCCAA | 91 | 256 |
| 646432 | N/A | N/A | 2257 | 2273 | CGTGTTGGTTTTATTCC | 85 | 257 |

### Example 2: Effect of Mixed MOE and cEt, Mixed Backbone Modified Oligonucleotides on Human HTT RNA In Vitro, Single Dose

[0480] Modified oligonucleotides complementary to human HTT nucleic acid were designed and tested for their single dose effects on HTT RNA in vitro. The modified oligonucleotides were tested in a series of experiments that had the same culture conditions.

[0481] The modified oligonucleotides in the tables below are 17 nucleosides in length, wherein the sugar motif for the gapmers is (from 5′ to 3′): ekekddddddddkekee; wherein each “d” represents a 2′-β-D-deoxyribosyl sugar, each “e” represents a 2′-MOE sugar moiety, and each “k” represents a cEt sugar moiety. The internucleoside linkage motif for the gapmers is (from 5′ to 3′): soosssssssssooss; wherein each “o” represents a phosphodiester internucleoside linkage, and each “s” represents a phosphorothioate internucleoside linkage. Each cytosine residue is a 5-methylcytosine.

[0482] “Start site” indicates the 5′-most nucleoside to which the modified oligonucleotide is complementary in the target nucleic acid sequence. “Stop site” indicates the 3′-most nucleoside to which the modified oligonucleotide is complementary in the target nucleic acid sequence. Each modified oligonucleotide listed in the tables below is 100% complementary to SEQ ID NO: 1 (described herein above), to SEQ ID NO: 2 (described herein above), or to both. ‘N/A’ indicates that the modified oligonucleotide is not 100% complementary to that particular target nucleic acid sequence.

[0483] Cultured A431 cells were treated with modified oligonucleotide at a concentration of 2000 nM by free uptake at a density of 10,000 cells per well. After a treatment period of approximately 48 hours, total RNA was isolated from the cells and HTT RNA levels were measured by quantitative real-time RTPCR. HTT RNA levels were measured by human primer probe set RTS36485 (forward sequence GAGGAAGTAGATCCAAACACACA, designated herein as SEQ ID NO: 14; reverse sequence GCCGCTATTCCTTTTATGACC, designated herein as SEQ ID NO: 15; probe sequence TCCACCATTTCTGCCACCATCTCA, designated herein as SEQ ID NO: 16). HTT RNA levels were normalized to total RNA content, as measured by RIBOGREEN®. Reduction of HTT RNA is presented in the tables below as percent HTT RNA relative to the amount of the HTT RNA in untreated control cells (% UTC). Each table represents results from an individual assay plate.

[0484] In the tables below, Compound 646253 (described herein above) was used as an inter-experimental control.

TABLE 5
Reduction of HTT RNA by modified oligonucleotides with a mixed MOE/cEt sugar motif
and mixed PO/PS internucleoside linkages in A431 cells

| | SEQ | SEQ | SEQ | SEQ | | | |
|---|---|---|---|---|---|---|---|
| | ID No: | ID No: | ID No: | ID No: | | HTT | SEQ |
| Compound | 1 Start | 1 Stop | 2 Start | 2 Stop | | (% | ID |
| Number | Site | Site | Site | Site | Sequence (5′ to 3′) | UTC) | NO |
| 646253 | N/A | N/A | 1447 | 1463 | AGGGTTACCGCCATCCC | 140 | 78 |
| 953797 | 33 | 49 | 1018 | 1034 | GTAAAAGCAGAACCTGA | 93 | 258 |
| 953805 | N/A | N/A | 1584 | 1600 | ACCCAAGTGAGGGAGCG | 115 | 259 |
| 953813 | N/A | N/A | 1712 | 1728 | AAACAAGTTCTCGCCCC | 85 | 110 |
| 953821 | N/A | N/A | 1805 | 1821 | AGGGAAGTGGCACTGAG | 108 | 260 |
| 953829 | N/A | N/A | 1906 | 1922 | AGCATTATGTCATCCAC | 107 | 261 |
| 953837 | N/A | N/A | 1984 | 2000 | GAAAAGAAATCTCCCAT | 95 | 185 |
| 953845 | N/A | N/A | 2045 | 2061 | ATGAAATGTCCTGACAA | 76 | 262 |
| 953853 | N/A | N/A | 2147 | 2163 | CCACAACTCATTCAAAC | 146 | 263 |
| 953861 | N/A | N/A | 2225 | 2241 | AAAAACTTCAATCAACT | 137 | 264 |
| 953869 | N/A | N/A | 2240 | 2256 | CAACACACATAGGCAAA | 91 | 265 |
| 953877 | N/A | N/A | 2397 | 2413 | AGCAAACAGAAACCCTT | 103 | 266 |
| 953885 | N/A | N/A | 2426 | 2442 | TCCAAAAAGTAACAAGC | 87 | 267 |
| 953893 | N/A | N/A | 2468 | 2484 | TCAAAAATTCTCCCCAA | 102 | 268 |
| 953901 | N/A | N/A | 2570 | 2586 | CACCAGAGTACTTCCTA | 85 | 269 |
| 953909 | N/A | N/A | 2617 | 2633 | CCAGATCGGAAATAGAA | 147 | 270 |
| 953917 | N/A | N/A | 2660 | 2676 | GTCTTAACAGAGATATT | 93 | 271 |
| 953925 | N/A | N/A | 2714 | 2730 | AGACAAGGATCATAACA | 121 | 272 |
| 953933 | N/A | N/A | 2736 | 2752 | TTCTAATTAAACTTTGA | 94 | 273 |
| 953941 | N/A | N/A | 2784 | 2800 | CCTAAATTTTATTCCAA | 63 | 274 |
| 953949 | N/A | N/A | 2827 | 2843 | CCAAATATCCAAAAAGT | 107 | 275 |
| 953957 | N/A | N/A | 2893 | 2909 | CTACAGTAAATTTCTGG | 79 | 276 |
| 953965 | N/A | N/A | 2906 | 2922 | TCCTAGAAAAGCACTAC | 93 | 277 |
| 953973 | N/A | N/A | 2952 | 2968 | GTTTACACAAGATACAT | 102 | 278 |
| 953981 | N/A | N/A | 3026 | 3042 | TATTTTTAGAATGATCA | 97 | 279 |
| 953989 | N/A | N/A | 3055 | 3071 | TGTCAAATCAGCATAAG | 83 | 280 |
| 953997 | N/A | N/A | 3088 | 3104 | ACCCATATTTTGAAGAT | 120 | 281 |
| 954005 | N/A | N/A | 3134 | 3150 | ACAAAATCTATCTCCTT | 82 | 282 |
| 954013 | N/A | N/A | 3161 | 3177 | AATCATATATTACCTTA | 107 | 283 |
| 954021 | N/A | N/A | 3515 | 3531 | GTCAATGTATTACTTAT | 60 | 284 |
| 954029 | N/A | N/A | 3570 | 3586 | GTGGAAGGAAGATATTT | 88 | 285 |
| 954037 | N/A | N/A | 3647 | 3663 | TTATATCTGGCAGGATA | 102 | 286 |
| 954045 | N/A | N/A | 3674 | 3690 | TTAAATCTATCTTACAA | 113 | 287 |
| 954053 | N/A | N/A | 3748 | 3764 | TGACAATGTGAGACTAC | 114 | 288 |
| 954061 | N/A | N/A | 4068 | 4084 | ATAAATAAACCTAATGC | 92 | 289 |
| 954069 | N/A | N/A | 4151 | 4167 | AATTAGTGAATACCTCC | 98 | 290 |
| 954077 | N/A | N/A | 4188 | 4204 | CAAAATCCAAACTTTGT | 89 | 291 |
| 954085 | N/A | N/A | 4272 | 4288 | ACAGAACAGATACTTTC | 78 | 292 |
| 954093 | N/A | N/A | 4338 | 4354 | TCATAAACTGAGGCCCA | 117 | 293 |
| 954101 | N/A | N/A | 4441 | 4457 | CTAATTACTGTGAGGAC | 59 | 294 |
| 954109 | N/A | N/A | 4475 | 4491 | TAAGAAACTGCCAGAAG | 92 | 295 |
| 954117 | N/A | N/A | 4511 | 4527 | AGTCAGGGAAACACCAG | 103 | 296 |
| 954125 | N/A | N/A | 4548 | 4564 | GTACATGTTTAGTAAAT | 102 | 297 |
| 954133 | N/A | N/A | 4622 | 4638 | ATGAAAGCTTCACGAGG | 80 | 298 |
| 954141 | N/A | N/A | 4839 | 4855 | CAACACTTAGTGCTACA | 96 | 299 |
| 954149 | N/A | N/A | 5500 | 5516 | TTAAAATATCAACACTG | 88 | 300 |
| 954157 | N/A | N/A | 5615 | 5631 | TACGATAGTGATACTGC | 102 | 301 |
| 954165 | N/A | N/A | 5763 | 5779 | CCTTACACTAGACTCTT | 84 | 302 |
| 954173 | N/A | N/A | 5822 | 5838 | CTGAAACAGGAAGATTT | 91 | 303 |
| 954181 | N/A | N/A | 5876 | 5892 | TACAAATGTCCCCCTCA | 117 | 304 |
| 954189 | N/A | N/A | 5959 | 5975 | GCCAATATCTTTATTCC | 102 | 305 |
| 954197 | N/A | N/A | 6032 | 6048 | TAAGATTGAAATTCAGA | 89 | 306 |
| 954205 | N/A | N/A | 6187 | 6203 | TCAAAATCCAGTCAGTC | 46 | 307 |
| 954213 | N/A | N/A | 6238 | 6254 | TGCTAAATTGTTATACT | 84 | 308 |
| 954221 | N/A | N/A | 6300 | 6316 | AGCTATTGCAGCAGGAT | 86 | 309 |
| 954229 | N/A | N/A | 6705 | 6721 | TATAAGAAAGAGCCTGG | 95 | 310 |
| 954237 | N/A | N/A | 6727 | 6743 | GAACAAGGGTTTGCAAG | 109 | 311 |
| 954245 | N/A | N/A | 6843 | 6859 | GACAATCCAAAGGAAGG | 116 | 312 |
| 954253 | N/A | N/A | 7036 | 7052 | GATCAGACTTAAATGTA | 99 | 313 |
| 954261 | N/A | N/A | 7163 | 7179 | ACTAAGATAATTCCATG | 91 | 314 |
| 954269 | N/A | N/A | 7193 | 7209 | AATTAAGGACGATTAAT | 135 | 315 |
| 954277 | N/A | N/A | 7202 | 7218 | AATTTATACAATTAAGG | 88 | 316 |
| 954285 | N/A | N/A | 7254 | 7270 | TGGCACAGGATCGACAT | 111 | 317 |
| 954293 | N/A | N/A | 7373 | 7389 | CGGAAATGCAAGGGACC | 126 | 318 |
| 954301 | N/A | N/A | 7523 | 7539 | TTACACAAAGTTTGCCC | 132 | 319 |
| 954309 | N/A | N/A | 7597 | 7613 | TACAATGGCAGAGCCGC | 115 | 320 |
| 954317 | N/A | N/A | 7712 | 7728 | TCAAATACTATCTCATG | 74 | 321 |
| 954325 | N/A | N/A | 7791 | 7807 | AAAACTATAACCTGCAT | 142 | 322 |
| 954333 | N/A | N/A | 8161 | 8177 | AAAGAAATGCTTTCCAG | 115 | 323 |
| 954341 | N/A | N/A | 8292 | 8308 | AGACAAAGATGACAGAC | 83 | 324 |
| 954349 | N/A | N/A | 8332 | 8348 | GGGAAGAAGACACAAGA | 82 | 325 |
| 954357 | N/A | N/A | 8365 | 8381 | CATTTAAATGCTTGTAT | 82 | 326 |
| 954365 | N/A | N/A | 8442 | 8458 | AACAATATCTATGACAC | 56 | 327 |
| 954373 | N/A | N/A | 8467 | 8483 | ATAAGAATTACAGGTAC | 83 | 328 |
| 954381 | N/A | N/A | 8490 | 8506 | TCTAAAATATTACATAG | 80 | 329 |
| 954389 | N/A | N/A | 8551 | 8567 | AGCCACAAAAATGTGAG | 116 | 330 |
| 954397 | N/A | N/A | 8624 | 8640 | ATTTACAGGAAATGGAG | 80 | 331 |
| 954405 | N/A | N/A | 8679 | 8695 | ACTAAATGTTTTGAGTG | 138 | 332 |

TABLE 6
Reduction of HTT RNA by modified oligonucleotides with a mixed MOE/cEt sugar motif
and mixed PO/PS internucleoside linkages in A431 cells

| | SEQ | SEQ | SEQ | SEQ | | | |
|---|---|---|---|---|---|---|---|
| | ID No: | ID No: | ID No: | ID No: | | HTT | SEQ |
| Compound | 1 Start | 1 Stop | 2 Start | 2 Stop | | (% | ID |
| Number | Site | Site | Site | Site | Sequence (5′ to 3′) | UTC) | NO |
| 646253 | N/A | N/A | 1447 | 1463 | AGGGTTACCGCCATCCC | 140 | 78 |
| 953798 | 34 | 50 | 1019 | 1035 | GGTAAAAGCAGAACCTG | 142 | 333 |
| 953806 | N/A | N/A | 1595 | 1611 | GACAAGGGAAGACCCAA | 122 | 334 |
| 953814 | N/A | N/A | 1716 | 1732 | AAAGAAACAAGTTCTCG | 125 | 335 |
| 953822 | N/A | N/A | 1809 | 1825 | GAAGAGGGAAGTGGCAC | 105 | 140 |
| 953830 | N/A | N/A | 1911 | 1927 | CTAAAAGCATTATGTCA | 83 | 336 |
| 953838 | N/A | N/A | 1985 | 2001 | GGAAAAGAAATCTCCCA | 88 | 337 |
| 953846 | N/A | N/A | 2046 | 2062 | AATGAAATGTCCTGACA | 85 | 338 |
| 953854 | N/A | N/A | 2163 | 2179 | CCACTTTACTTGGCAAC | 105 | 339 |
| 953862 | N/A | N/A | 2226 | 2242 | AAAAAACTTCAATCAAC | 106 | 247 |
| 953870 | N/A | N/A | 2282 | 2298 | CGGCAATTAACCTCCCC | 94 | 340 |
| 953878 | N/A | N/A | 2398 | 2414 | AAGCAAACAGAAACCCT | 125 | 341 |
| 953886 | N/A | N/A | 2427 | 2443 | TTCCAAAAAGTAACAAG | 105 | 342 |
| 953894 | N/A | N/A | 2469 | 2485 | TTCAAAAATTCTCCCCA | 94 | 343 |
| 953902 | N/A | N/A | 2590 | 2606 | TAAGAGAAAGGCCTGAA | 84 | 344 |
| 953910 | N/A | N/A | 2619 | 2635 | ATCCAGATCGGAAATAG | 122 | 345 |
| 953918 | N/A | N/A | 2669 | 2685 | AATTAATCAGTCTTAAC | 86 | 346 |
| 953926 | N/A | N/A | 2718 | 2734 | GACGAGACAAGGATCAT | 120 | 347 |
| 953934 | N/A | N/A | 2747 | 2763 | TCCGAATCATTTTCTAA | 113 | 348 |
| 953942 | N/A | N/A | 2785 | 2801 | TCCTAAATTTTATTCCA | 88 | 349 |
| 953950 | N/A | N/A | 2828 | 2844 | TCCAAATATCCAAAAAG | 122 | 350 |
| 953958 | N/A | N/A | 2895 | 2911 | CACTACAGTAAATTTCT | 84 | 351 |
| 953966 | N/A | N/A | 2936 | 2952 | TGCAATGTGTGAACTTT | 60 | 352 |
| 953974 | N/A | N/A | 2959 | 2975 | GTTTAGTGTTTACACAA | 114 | 353 |
| 953982 | N/A | N/A | 3029 | 3045 | GCATATTTTTAGAATGA | 159 | 354 |
| 953990 | N/A | N/A | 3069 | 3085 | GCAAATGCAGGTTCTGT | 103 | 355 |
| 953998 | N/A | N/A | 3103 | 3119 | AGGAAATTTCTTGATAC | 124 | 356 |
| 954006 | N/A | N/A | 3138 | 3154 | TGAAACAAAATCTATCT | 89 | 357 |
| 954014 | N/A | N/A | 3169 | 3185 | AATAAGGTAATCATATA | 117 | 358 |
| 954022 | N/A | N/A | 3516 | 3532 | TGTCAATGTATTACTTA | 77 | 359 |
| 954030 | N/A | N/A | 3597 | 3613 | ACAAAGTTAGGTACTCA | 50 | 360 |
| 954038 | N/A | N/A | 3654 | 3670 | GAACAGGTTATATCTGG | 84 | 361 |
| 954046 | N/A | N/A | 3675 | 3691 | TTTAAATCTATCTTACA | 119 | 362 |
| 954054 | N/A | N/A | 4018 | 4034 | AGTTATTATTCTAGCCA | 84 | 363 |
| 954062 | N/A | N/A | 4069 | 4085 | TATAAATAAACCTAATG | 85 | 364 |
| 954070 | N/A | N/A | 4152 | 4168 | AAATTAGTGAATACCTC | 90 | 365 |
| 954078 | N/A | N/A | 4189 | 4205 | CCAAAATCCAAACTTTG | 118 | 366 |
| 954086 | N/A | N/A | 4274 | 4290 | AAACAGAACAGATACTT | 92 | 367 |
| 954094 | N/A | N/A | 4344 | 4360 | AAACACTCATAAACTGA | 91 | 368 |
| 954102 | N/A | N/A | 4443 | 4459 | TCCTAATTACTGTGAGG | 101 | 369 |
| 954110 | N/A | N/A | 4478 | 4494 | GAATAAGAAACTGCCAG | 89 | 370 |
| 954118 | N/A | N/A | 4516 | 4532 | AATAAAGTCAGGGAAAC | 71 | 371 |
| 954126 | N/A | N/A | 4553 | 4569 | ACATAGTACATGTTTAG | 87 | 372 |
| 954134 | N/A | N/A | 4623 | 4639 | AATGAAAGCTTCACGAG | 84 | 373 |
| 954142 | N/A | N/A | 4897 | 4913 | TGATAGAGCAAGAACTG | 87 | 374 |
| 954150 | N/A | N/A | 5504 | 5520 | GTATTTAAAATATCAAC | 88 | 375 |
| 954158 | N/A | N/A | 5616 | 5632 | CTACGATAGTGATACTG | 101 | 376 |
| 954166 | N/A | N/A | 5781 | 5797 | TACCACTACTTCATACA | 94 | 377 |
| 954174 | N/A | N/A | 5823 | 5839 | CCTGAAACAGGAAGATT | 92 | 378 |
| 954182 | N/A | N/A | 5877 | 5893 | CTACAAATGTCCCCCTC | 97 | 379 |
| 954190 | N/A | N/A | 5965 | 5981 | ATAAATGCCAATATCTT | 107 | 380 |
| 954198 | N/A | N/A | 6034 | 6050 | CTTAAGATTGAAATTCA | 84 | 381 |
| 954206 | N/A | N/A | 6193 | 6209 | CCGCATTCAAAATCCAG | 124 | 382 |
| 954214 | N/A | N/A | 6244 | 6260 | AGCTACTGCTAAATTGT | 89 | 383 |
| 954222 | N/A | N/A | 6305 | 6321 | GTTTAAGCTATTGCAGC | 101 | 384 |
| 954230 | N/A | N/A | 6706 | 6722 | GTATAAGAAAGAGCCTG | 115 | 385 |
| 954238 | N/A | N/A | 6732 | 6748 | AATGAGAACAAGGGTTT | 64 | 386 |
| 954246 | N/A | N/A | 6844 | 6860 | AGACAATCCAAAGGAAG | 128 | 387 |
| 954254 | N/A | N/A | 7043 | 7059 | CAAAATGGATCAGACTT | 85 | 388 |
| 954262 | N/A | N/A | 7164 | 7180 | TACTAAGATAATTCCAT | 134 | 389 |
| 954270 | N/A | N/A | 7194 | 7210 | CAATTAAGGACGATTAA | 88 | 390 |
| 954278 | N/A | N/A | 7231 | 7247 | CAACAGGTAGAACTGAC | 118 | 391 |
| 954286 | N/A | N/A | 7286 | 7302 | CACAAACTTCAGTAATC | 120 | 392 |
| 954294 | N/A | N/A | 7374 | 7390 | ACGGAAATGCAAGGGAC | 73 | 393 |
| 954302 | N/A | N/A | 7525 | 7541 | ATTTACACAAAGTTTGC | 84 | 394 |
| 954310 | N/A | N/A | 7598 | 7614 | CTACAATGGCAGAGCCG | 132 | 395 |
| 954318 | N/A | N/A | 7723 | 7739 | GACCAAAATAATCAAAT | 113 | 396 |
| 954326 | N/A | N/A | 7792 | 7808 | GAAAACTATAACCTGCA | 107 | 397 |
| 954334 | N/A | N/A | 8167 | 8183 | GCCAAAAAAGAAATGCT | 131 | 398 |
| 954342 | N/A | N/A | 8296 | 8312 | AGTTAGACAAAGATGAC | 102 | 399 |
| 954350 | N/A | N/A | 8340 | 8356 | TAAAATCTGGGAAGAAG | 87 | 400 |
| 954358 | N/A | N/A | 8368 | 8384 | ACACATTTAAATGCTTG | 92 | 401 |
| 954366 | N/A | N/A | 8443 | 8459 | GAACAATATCTATGACA | 77 | 402 |
| 954374 | N/A | N/A | 8469 | 8485 | TAATAAGAATTACAGGT | 78 | 403 |
| 954382 | N/A | N/A | 8516 | 8532 | CCAAAAGTCCTCTTTTA | 95 | 404 |
| 954390 | N/A | N/A | 8577 | 8593 | GAGAATATGTCACCAGC | 102 | 405 |
| 954398 | N/A | N/A | 8626 | 8642 | TTATTTACAGGAAATGG | 87 | 406 |
| 954406 | N/A | N/A | 8680 | 8696 | GACTAAATGTTTTGAGT | 81 | 407 |

TABLE 7
Reduction of HTT RNA by modified oligonucleotides with a mixed MOE/cEt sugar motif
and mixed PO/PS internucleoside linkages in A431 cells

| | SEQ | SEQ | SEQ | SEQ | | | |
|---|---|---|---|---|---|---|---|
| | ID No: | ID No: | ID No: | ID No: | | HTT | SEQ |
| Compound | 1 Start | 1 Stop | 2 Start | 2 Stop | | (% | ID |
| Number | Site | Site | Site | Site | Sequence (5′ to 3′) | UTC) | NO |
| 646253 | N/A | N/A | 1447 | 1463 | AGGGTTACCGCCATCCC | 130 | 78 |
| 953799 | 39 | 55 | 1024 | 1040 | CCGCAGGTAAAAGCAGA | 66 | 408 |
| 953807 | N/A | N/A | 1596 | 1612 | GGACAAGGGAAGACCCA | 104 | 409 |
| 953815 | N/A | N/A | 1725 | 1741 | CGCAAATAAAAAGAAAC | 122 | 112 |
| 953823 | N/A | N/A | 1812 | 1828 | CTAGAAGAGGGAAGTGG | 145 | 141 |
| 953831 | N/A | N/A | 1912 | 1928 | CCTAAAAGCATTATGTC | 83 | 410 |
| 953839 | N/A | N/A | 1986 | 2002 | AGGAAAAGAAATCTCCC | 133 | 411 |
| 953847 | N/A | N/A | 2051 | 2067 | AACTAAATGAAATGTCC | 132 | 412 |
| 953855 | N/A | N/A | 2165 | 2181 | CACCACTTTACTTGGCA | 102 | 413 |
| 953863 | N/A | N/A | 2227 | 2243 | CAAAAAACTTCAATCAA | 117 | 414 |
| 953871 | N/A | N/A | 2308 | 2324 | GTAAAATGTACACCTCA | 74 | 415 |
| 953879 | N/A | N/A | 2403 | 2419 | CAATGAAGCAAACAGAA | 106 | 416 |
| 953887 | N/A | N/A | 2446 | 2462 | AGCAACAGAAACCCCTA | 115 | 417 |
| 953895 | N/A | N/A | 2470 | 2486 | TTTCAAAAATTCTCCCC | 136 | 418 |
| 953903 | N/A | N/A | 2592 | 2608 | GGTAAGAGAAAGGCCTG | 121 | 419 |
| 953911 | N/A | N/A | 2623 | 2639 | ACACATCCAGATCGGAA | 115 | 420 |
| 953919 | N/A | N/A | 2670 | 2686 | AAATTAATCAGTCTTAA | 90 | 421 |
| 953927 | N/A | N/A | 2723 | 2739 | TTGAAGACGAGACAAGG | 110 | 422 |
| 953935 | N/A | N/A | 2766 | 2782 | AAATAAGCTAACACTGC | 110 | 423 |
| 953943 | N/A | N/A | 2797 | 2813 | AGAATAATTTATTCCTA | 123 | 424 |
| 953951 | N/A | N/A | 2855 | 2871 | AGATAAGCCAAATTGTT | 129 | 425 |
| 953959 | N/A | N/A | 2897 | 2913 | AGCACTACAGTAAATTT | 105 | 426 |
| 953967 | N/A | N/A | 2941 | 2957 | ATACATGCAATGTGTGA | 111 | 427 |
| 953975 | N/A | N/A | 2990 | 3006 | CAGAAAGGTCTTCCTTC | 131 | 428 |
| 953983 | N/A | N/A | 3031 | 3047 | AGGCATATTTTTAGAAT | 116 | 429 |
| 953991 | N/A | N/A | 3070 | 3086 | AGCAAATGCAGGTTCTG | 49 | 430 |
| 953999 | N/A | N/A | 3104 | 3120 | AAGGAAATTTCTTGATA | 123 | 431 |
| 954007 | N/A | N/A | 3139 | 3155 | ATGAAACAAAATCTATC | 103 | 432 |
| 954015 | N/A | N/A | 3170 | 3186 | AAATAAGGTAATCATAT | 89 | 433 |
| 954023 | N/A | N/A | 3531 | 3547 | ACAGAATTTGTATCATG | 47 | 434 |
| 954031 | N/A | N/A | 3598 | 3614 | GACAAAGTTAGGTACTC | 81 | 435 |
| 954039 | N/A | N/A | 3656 | 3672 | ATGAACAGGTTATATCT | 101 | 436 |
| 954047 | N/A | N/A | 3679 | 3695 | GCATTTTAAATCTATCT | 28 | 437 |
| 954055 | N/A | N/A | 4032 | 4048 | TAAGAACCTTTAAAAGT | 109 | 438 |
| 954063 | N/A | N/A | 4070 | 4086 | CTATAAATAAACCTAAT | 104 | 439 |
| 954071 | N/A | N/A | 4153 | 4169 | AAAATTAGTGAATACCT | 80 | 440 |
| 954079 | N/A | N/A | 4190 | 4206 | GCCAAAATCCAAACTTT | 118 | 441 |
| 954087 | N/A | N/A | 4280 | 4296 | CCATAAAAACAGAACAG | 93 | 442 |
| 954095 | N/A | N/A | 4348 | 4364 | GCACAAACACTCATAAA | 100 | 443 |
| 954103 | N/A | N/A | 4454 | 4470 | TATTAATTGCCTCCTAA | 81 | 444 |
| 954111 | N/A | N/A | 4479 | 4495 | AGAATAAGAAACTGCCA | 119 | 445 |
| 954119 | N/A | N/A | 4517 | 4533 | GAATAAAGTCAGGGAAA | 79 | 446 |
| 954127 | N/A | N/A | 4555 | 4571 | GCACATAGTACATGTTT | 107 | 447 |
| 954135 | N/A | N/A | 4629 | 4645 | CATTAGAATGAAAGCTT | 74 | 448 |
| 954143 | N/A | N/A | 4899 | 4915 | GCTGATAGAGCAAGAAC | 116 | 449 |
| 954151 | N/A | N/A | 5505 | 5521 | CGTATTTAAAATATCAA | 101 | 450 |
| 954159 | N/A | N/A | 5618 | 5634 | AGCTACGATAGTGATAC | 108 | 451 |
| 954167 | N/A | N/A | 5786 | 5802 | TGGAATACCACTACTTC | 110 | 452 |
| 954175 | N/A | N/A | 5844 | 5860 | TAAAATGACATCCTTGC | 123 | 453 |
| 954183 | N/A | N/A | 5882 | 5898 | TCTTACTACAAATGTCC | 125 | 454 |
| 954191 | N/A | N/A | 5966 | 5982 | CATAAATGCCAATATCT | 120 | 455 |
| 954199 | N/A | N/A | 6036 | 6052 | CACTTAAGATTGAAATT | 122 | 456 |
| 954207 | N/A | N/A | 6211 | 6227 | CAACAAGTGCAGTTGGT | 104 | 457 |
| 954215 | N/A | N/A | 6249 | 6265 | ACGCAAGCTACTGCTAA | 115 | 458 |
| 954223 | N/A | N/A | 6328 | 6344 | TGATAAGCTCTTGCTTG | 107 | 459 |
| 954231 | N/A | N/A | 6707 | 6723 | AGTATAAGAAAGAGCCT | 101 | 460 |
| 954239 | N/A | N/A | 6802 | 6818 | TGATAAGAATCCAGTAT | 95 | 461 |
| 954247 | N/A | N/A | 6913 | 6929 | ATAGATAAACTCGACTT | 86 | 462 |
| 954255 | N/A | N/A | 7044 | 7060 | TCAAAATGGATCAGACT | 97 | 463 |
| 954263 | N/A | N/A | 7167 | 7183 | GGGTACTAAGATAATTC | 100 | 464 |
| 954271 | N/A | N/A | 7195 | 7211 | ACAATTAAGGACGATTA | 93 | 465 |
| 954279 | N/A | N/A | 7234 | 7250 | GACCAACAGGTAGAACT | 109 | 466 |
| 954287 | N/A | N/A | 7287 | 7303 | ACACAAACTTCAGTAAT | 128 | 467 |
| 954295 | N/A | N/A | 7423 | 7439 | TCCTACTTGGCTTCTTT | 131 | 468 |
| 954303 | N/A | N/A | 7528 | 7544 | ACCATTTACACAAAGTT | 86 | 469 |
| 954311 | N/A | N/A | 7618 | 7634 | TGCTTATGGCTACTTTC | 108 | 470 |
| 954319 | N/A | N/A | 7733 | 7749 | TTAAATGGTTGACCAAA | 84 | 471 |
| 954327 | N/A | N/A | 7793 | 7809 | GGAAAACTATAACCTGC | 120 | 472 |
| 954335 | N/A | N/A | 8222 | 8238 | GTATATGTGTAACTTTT | 64 | 473 |
| 954343 | N/A | N/A | 8301 | 8317 | TAGGAAGTTAGACAAAG | 56 | 474 |
| 954351 | N/A | N/A | 8343 | 8359 | TATTAAAATCTGGGAAG | 105 | 475 |
| 954359 | N/A | N/A | 8370 | 8386 | TGACACATTTAAATGCT | 126 | 476 |
| 954367 | N/A | N/A | 8445 | 8461 | TGGAACAATATCTATGA | 85 | 477 |
| 954375 | N/A | N/A | 8470 | 8486 | TTAATAAGAATTACAGG | 90 | 478 |
| 954383 | N/A | N/A | 8517 | 8533 | TCCAAAAGTCCTCTTTT | 122 | 479 |
| 954391 | N/A | N/A | 8578 | 8594 | AGAGAATATGTCACCAG | 67 | 480 |
| 954399 | N/A | N/A | 8629 | 8645 | GACTTATTTACAGGAAA | 77 | 481 |
| 954407 | N/A | N/A | 8683 | 8699 | TAAGACTAAATGTTTTG | 117 | 482 |

TABLE 8
Reduction of HTT RNA by modified oligonucleotides with a mixed MOE/cEt sugar motif
and mixed PO/PS internucleoside linkages in A431 cells

| | SEQ | SEQ | SEQ | SEQ | | | |
|---|---|---|---|---|---|---|---|
| | ID No: | ID No: | ID No: | ID No: | | HTT | SEQ |
| Compound | 1 Start | 1 Stop | 2 Start | 2 Stop | | (% | ID |
| Number | Site | Site | Site | Site | Sequence (5′ to 3′) | UTC) | NO |
| 646253 | N/A | N/A | 1447 | 1463 | AGGGTTACCGCCATCCC | 93 | 78 |
| 953800 | 287 | 303 | 1266 | 1282 | AGCTGAGGAGGCGGCGG | 129 | 483 |
| 953808 | N/A | N/A | 1603 | 1619 | CGCGAGAGGACAAGGGA | 114 | 484 |
| 953816 | N/A | N/A | 1753 | 1769 | AGTTAAAAGAACCCCCG | 116 | 485 |
| 953824 | N/A | N/A | 1814 | 1830 | GACTAGAAGAGGGAAGT | 110 | 486 |
| 953832 | N/A | N/A | 1913 | 1929 | TCCTAAAAGCATTATGT | 141 | 171 |
| 953840 | N/A | N/A | 1987 | 2003 | TAGGAAAAGAAATCTCC | 115 | 186 |
| 953848 | N/A | N/A | 2096 | 2112 | CTCTTAGGTGGTGCTTA | 104 | 217 |
| 953856 | N/A | N/A | 2188 | 2204 | TTTCATTAATCACCACG | 115 | 487 |
| 953864 | N/A | N/A | 2229 | 2245 | GGCAAAAAACTTCAATC | 81 | 248 |
| 953872 | N/A | N/A | 2309 | 2325 | GGTAAAATGTACACCTC | 109 | 487 |
| 953880 | N/A | N/A | 2405 | 2421 | AGCAATGAAGCAAACAG | 96 | 488 |
| 953888 | N/A | N/A | 2447 | 2463 | AAGCAACAGAAACCCCT | 112 | 489 |
| 953896 | N/A | N/A | 2494 | 2510 | GTTTTAATGGTCTCTCT | 59 | 490 |
| 953904 | N/A | N/A | 2603 | 2619 | GAATACTGAGAGGTAAG | 101 | 491 |
| 953912 | N/A | N/A | 2634 | 2650 | TGCCATCTGGGACACAT | 117 | 492 |
| 953920 | N/A | N/A | 2671 | 2687 | AAAATTAATCAGTCTTA | 88 | 493 |
| 953928 | N/A | N/A | 2730 | 2746 | TTAAACTTTGAAGACGA | 86 | 494 |
| 953936 | N/A | N/A | 2767 | 2783 | CAAATAAGCTAACACTG | 112 | 495 |
| 953944 | N/A | N/A | 2803 | 2819 | TCCTTTAGAATAATTTA | 111 | 496 |
| 953952 | N/A | N/A | 2859 | 2875 | GAAGAGATAAGCCAAAT | 101 | 497 |
| 953960 | N/A | N/A | 2898 | 2914 | AAGCACTACAGTAAATT | 111 | 498 |
| 953968 | N/A | N/A | 2945 | 2961 | CAAGATACATGCAATGT | 121 | 499 |
| 953976 | N/A | N/A | 2991 | 3007 | GCAGAAAGGTCTTCCTT | 114 | 500 |
| 953984 | N/A | N/A | 3035 | 3051 | GAGAAGGCATATTTTTA | 103 | 501 |
| 953992 | N/A | N/A | 3075 | 3091 | AGATAAGCAAATGCAGG | 97 | 502 |
| 954000 | N/A | N/A | 3108 | 3124 | AGCAAAGGAAATTTCTT | 121 | 503 |
| 954008 | N/A | N/A | 3148 | 3164 | CTTAAAGTAATGAAACA | 132 | 504 |
| 954016 | N/A | N/A | 3171 | 3187 | TAAATAAGGTAATCATA | 125 | 505 |
| 954024 | N/A | N/A | 3533 | 3549 | TTACAGAATTTGTATCA | 138 | 506 |
| 954032 | N/A | N/A | 3620 | 3636 | TGAAATAGTGCTTGTTC | 91 | 507 |
| 954040 | N/A | N/A | 3657 | 3673 | TATGAACAGGTTATATC | 120 | 508 |
| 954048 | N/A | N/A | 3701 | 3717 | CTAAACTACTTTTGTTT | 95 | 509 |
| 954056 | N/A | N/A | 4033 | 4049 | CTAAGAACCTTTAAAAG | 135 | 510 |
| 954064 | N/A | N/A | 4071 | 4087 | ACTATAAATAAACCTAA | 117 | 511 |
| 954072 | N/A | N/A | 4154 | 4170 | CAAAATTAGTGAATACC | 93 | 512 |
| 954080 | N/A | N/A | 4199 | 4215 | AACAGAACTGCCAAAAT | 117 | 513 |
| 954088 | N/A | N/A | 4288 | 4304 | AGCAAGAGCCATAAAAA | 122 | 514 |
| 954096 | N/A | N/A | 4355 | 4371 | GAGCAGAGCACAAACAC | 102 | 515 |
| 954104 | N/A | N/A | 4455 | 4471 | GTATTAATTGCCTCCTA | 110 | 516 |
| 954112 | N/A | N/A | 4480 | 4496 | GAGAATAAGAAACTGCC | 108 | 517 |
| 954120 | N/A | N/A | 4519 | 4535 | ATGAATAAAGTCAGGGA | 105 | 518 |
| 954128 | N/A | N/A | 4557 | 4573 | AGGCACATAGTACATGT | 144 | 519 |
| 954136 | N/A | N/A | 4632 | 4648 | CTTCATTAGAATGAAAG | 123 | 520 |
| 954144 | N/A | N/A | 4900 | 4916 | GGCTGATAGAGCAAGAA | 118 | 521 |
| 954152 | N/A | N/A | 5506 | 5522 | CCGTATTTAAAATATCA | 101 | 522 |
| 954160 | N/A | N/A | 5679 | 5695 | CAACACATTGTGAGGTT | 110 | 523 |
| 954168 | N/A | N/A | 5815 | 5831 | AGGAAGATTTTGGACCT | 108 | 524 |
| 954176 | N/A | N/A | 5845 | 5861 | CTAAAATGACATCCTTG | 96 | 525 |
| 954184 | N/A | N/A | 5934 | 5950 | GGCAAGTAGTATTGGTC | 102 | 526 |
| 954192 | N/A | N/A | 5967 | 5983 | ACATAAATGCCAATATC | 115 | 527 |
| 954200 | N/A | N/A | 6046 | 6062 | AGCCAGAGTTCACTTAA | 98 | 528 |
| 954208 | N/A | N/A | 6221 | 6237 | TAGCAGAGTTCAACAAG | 106 | 529 |
| 954216 | N/A | N/A | 6253 | 6269 | GATAACGCAAGCTACTG | 107 | 530 |
| 954224 | N/A | N/A | 6345 | 6361 | GACTTATTTTTGTCTTC | 129 | 531 |
| 954232 | N/A | N/A | 6709 | 6725 | TAAGTATAAGAAAGAGC | 99 | 532 |
| 954240 | N/A | N/A | 6823 | 6839 | AGTTTTTACAAATCATC | 91 | 533 |
| 954248 | N/A | N/A | 6914 | 6930 | AATAGATAAACTCGACT | 100 | 534 |
| 954256 | N/A | N/A | 7086 | 7102 | AATAAAGTTGGACTTCT | 121 | 535 |
| 954264 | N/A | N/A | 7172 | 7188 | AACAAGGGTACTAAGAT | 80 | 536 |
| 954272 | N/A | N/A | 7196 | 7212 | TACAATTAAGGACGATT | 63 | 537 |
| 954280 | N/A | N/A | 7239 | 7255 | ATAAAGACCAACAGGTA | 118 | 538 |
| 954288 | N/A | N/A | 7297 | 7313 | TTAAACTGTGACACAAA | 71 | 539 |
| 954296 | N/A | N/A | 7441 | 7457 | ACACAATCCCTCTCAGA | 100 | 540 |
| 954304 | N/A | N/A | 7543 | 7559 | AATACTTACAATCTGAC | 54 | 541 |
| 954312 | N/A | N/A | 7626 | 7642 | ATACATATTGCTTATGG | 113 | 542 |
| 954320 | N/A | N/A | 7734 | 7750 | TTTAAATGGTTGACCAA | 94 | 543 |
| 954328 | N/A | N/A | 7794 | 7810 | GGGAAAACTATAACCTG | 121 | 544 |
| 954336 | N/A | N/A | 8272 | 8288 | CAAGAAGGGCTTTGTTT | 116 | 545 |
| 954344 | N/A | N/A | 8305 | 8321 | TTCTTAGGAAGTTAGAC | 107 | 546 |
| 954352 | N/A | N/A | 8344 | 8360 | ATATTAAAATCTGGGAA | 78 | 547 |
| 954360 | N/A | N/A | 8407 | 8423 | ACATATGTAATGTGATC | 111 | 548 |
| 954368 | N/A | N/A | 8450 | 8466 | TGCTATGGAACAATATC | 135 | 549 |
| 954376 | N/A | N/A | 8473 | 8489 | CAATTAATAAGAATTAC | 110 | 550 |
| 954384 | N/A | N/A | 8545 | 8561 | AAAAATGTGAGACCTTT | 103 | 551 |
| 954392 | N/A | N/A | 8582 | 8598 | GTAGAGAGAATATGTCA | 66 | 552 |
| 954400 | N/A | N/A | 8640 | 8656 | ATCAAGTGGTTGACTTA | 114 | 553 |
| 954408 | N/A | N/A | 8688 | 8704 | CTGAATAAGACTAAATG | 103 | 554 |

TABLE 9
Reduction of HTT RNA by modified oligonucleotides with a mixed MOE/cEt sugar motif
and mixed PO/PS internucleoside linkages in A431 cells

| | SEQ | SEQ | SEQ | SEQ | | | |
|---|---|---|---|---|---|---|---|
| | ID No: | ID No: | ID No: | ID No: | | HTT | SEQ |
| Compound | 1 Start | 1 Stop | 2 Start | 2 Stop | | (% | ID |
| Number | Site | Site | Site | Site | Sequence (5′ to 3′) | UTC) | NO |
| 646253 | N/A | N/A | 1447 | 1463 | AGGGTTACCGCCATCCC | 114 | 78 |
| 953801 | 329 | 345 | 1308 | 1324 | GGCTGAGGCAGCAGCGG | 129 | 555 |
| 953809 | N/A | N/A | 1624 | 1640 | CAACAAGGCTCTGCCTC | 119 | 556 |
| 953817 | N/A | N/A | 1757 | 1773 | ACGCAGTTAAAAGAACC | 88 | 557 |
| 953825 | N/A | N/A | 1817 | 1833 | TCAGACTAGAAGAGGGA | 123 | 558 |
| 953833 | N/A | N/A | 1942 | 1958 | CCCCCTGCCCCGCCACT | 91 | 559 |
| 953841 | N/A | N/A | 1993 | 2009 | TGCCACTAGGAAAAGAA | 125 | 188 |
| 953849 | N/A | N/A | 2108 | 2124 | AGATGAGCAGATCTCTT | 99 | 560 |
| 953857 | N/A | N/A | 2193 | 2209 | GATAATTTCATTAATCA | 92 | 561 |
| 953865 | N/A | N/A | 2230 | 2246 | AGGCAAAAAACTTCAAT | 103 | 562 |
| 953873 | N/A | N/A | 2310 | 2326 | TGGTAAAATGTACACCT | 88 | 563 |
| 953881 | N/A | N/A | 2406 | 2422 | CAGCAATGAAGCAAACA | 118 | 564 |
| 953889 | N/A | N/A | 2451 | 2467 | GAACAAGCAACAGAAAC | 99 | 565 |
| 953897 | N/A | N/A | 2502 | 2518 | CGCTAGATGTTTTAATG | 87 | 566 |
| 953905 | N/A | N/A | 2608 | 2624 | AAATAGAATACTGAGAG | 67 | 567 |
| 953913 | N/A | N/A | 2654 | 2670 | ACAGAGATATTCTTACC | 104 | 568 |
| 953921 | N/A | N/A | 2674 | 2690 | CTAAAAATTAATCAGTC | 73 | 569 |
| 953929 | N/A | N/A | 2731 | 2747 | ATTAAACTTTGAAGACG | 110 | 570 |
| 953937 | N/A | N/A | 2768 | 2784 | ACAAATAAGCTAACACT | 105 | 571 |
| 953945 | N/A | N/A | 2818 | 2834 | CAAAAAGTTTTTCCATC | 90 | 572 |
| 953953 | N/A | N/A | 2866 | 2882 | ACTTACTGAAGAGATAA | 83 | 573 |
| 953961 | N/A | N/A | 2902 | 2918 | AGAAAAGCACTACAGTA | 105 | 574 |
| 953969 | N/A | N/A | 2946 | 2962 | ACAAGATACATGCAATG | 100 | 575 |
| 953977 | N/A | N/A | 2993 | 3009 | CAGCAGAAAGGTCTTCC | 128 | 576 |
| 953985 | N/A | N/A | 3036 | 3052 | AGAGAAGGCATATTTTT | 89 | 577 |
| 953993 | N/A | N/A | 3077 | 3093 | GAAGATAAGCAAATGCA | 70 | 578 |
| 954001 | N/A | N/A | 3109 | 3125 | CAGCAAAGGAAATTTCT | 92 | 579 |
| 954009 | N/A | N/A | 3149 | 3165 | CCTTAAAGTAATGAAAC | 112 | 580 |
| 954017 | N/A | N/A | 3172 | 3188 | TTAAATAAGGTAATCAT | 93 | 581 |
| 954025 | N/A | N/A | 3537 | 3553 | GTAATTACAGAATTTGT | 104 | 582 |
| 954033 | N/A | N/A | 3622 | 3638 | ACTGAAATAGTGCTTGT | 68 | 583 |
| 954041 | N/A | N/A | 3658 | 3674 | ATATGAACAGGTTATAT | 91 | 584 |
| 954049 | N/A | N/A | 3703 | 3719 | TTCTAAACTACTTTTGT | 99 | 585 |
| 954057 | N/A | N/A | 4035 | 4051 | TGCTAAGAACCTTTAAA | 88 | 586 |
| 954065 | N/A | N/A | 4072 | 4088 | AACTATAAATAAACCTA | 107 | 587 |
| 954073 | N/A | N/A | 4155 | 4171 | TCAAAATTAGTGAATAC | 105 | 588 |
| 954081 | N/A | N/A | 4200 | 4216 | GAACAGAACTGCCAAAA | 78 | 589 |
| 954089 | N/A | N/A | 4294 | 4310 | CCAAAGAGCAAGAGCCA | 110 | 590 |
| 954097 | N/A | N/A | 4384 | 4400 | CCATAAGGAACTCCTGC | 96 | 591 |
| 954105 | N/A | N/A | 4457 | 4473 | AAGTATTAATTGCCTCC | 94 | 592 |
| 954113 | N/A | N/A | 4481 | 4497 | GGAGAATAAGAAACTGC | 86 | 593 |
| 954121 | N/A | N/A | 4520 | 4536 | AATGAATAAAGTCAGGG | 85 | 594 |
| 954129 | N/A | N/A | 4570 | 4586 | CTATAACAGTGCCAGGC | 49 | 595 |
| 954137 | N/A | N/A | 4742 | 4758 | TAACACTCGATTAACCC | 88 | 596 |
| 954145 | N/A | N/A | 5279 | 5295 | TCACAAGGTCGGCGGAT | 90 | 597 |
| 954153 | N/A | N/A | 5511 | 5527 | GAACACCGTATTTAAAA | 89 | 598 |
| 954161 | N/A | N/A | 5726 | 5742 | TCAAAAGCCATCATCTG | 84 | 599 |
| 954169 | N/A | N/A | 5816 | 5832 | CAGGAAGATTTTGGACC | 95 | 600 |
| 954177 | N/A | N/A | 5846 | 5862 | ACTAAAATGACATCCTT | 113 | 601 |
| 954185 | N/A | N/A | 5935 | 5951 | AGGCAAGTAGTATTGGT | 81 | 602 |
| 954193 | N/A | N/A | 5968 | 5984 | CACATAAATGCCAATAT | 90 | 603 |
| 954201 | N/A | N/A | 6093 | 6109 | CCTAACTGGTTTCTGCT | 89 | 604 |
| 954209 | N/A | N/A | 6228 | 6244 | TTATACTTAGCAGAGTT | 88 | 605 |
| 954217 | N/A | N/A | 6254 | 6270 | TGATAACGCAAGCTACT | 108 | 606 |
| 954225 | N/A | N/A | 6350 | 6366 | CCCCAGACTTATTTTTG | 85 | 607 |
| 954233 | N/A | N/A | 6712 | 6728 | AGGTAAGTATAAGAAAG | 89 | 608 |
| 954241 | N/A | N/A | 6833 | 6849 | AGGAAGGGAGAGTTTTT | 92 | 609 |
| 954249 | N/A | N/A | 6917 | 6933 | CAAAATAGATAAACTCG | 97 | 610 |
| 954257 | N/A | N/A | 7087 | 7103 | GAATAAAGTTGGACTTC | 104 | 611 |
| 954265 | N/A | N/A | 7184 | 7200 | CGATTAATTTTCAACAA | 109 | 612 |
| 954273 | N/A | N/A | 7197 | 7213 | ATACAATTAAGGACGAT | 74 | 613 |
| 954281 | N/A | N/A | 7241 | 7257 | ACATAAAGACCAACAGG | 87 | 614 |
| 954289 | N/A | N/A | 7299 | 7315 | ATTTAAACTGTGACACA | 109 | 615 |
| 954297 | N/A | N/A | 7479 | 7495 | TAAGATGCGAATACTCC | 87 | 616 |
| 954305 | N/A | N/A | 7546 | 7562 | CGAAATACTTACAATCT | 90 | 617 |
| 954313 | N/A | N/A | 7628 | 7644 | TCATACATATTGCTTAT | 64 | 618 |
| 954321 | N/A | N/A | 7735 | 7751 | TTTTAAATGGTTGACCA | 88 | 619 |
| 954329 | N/A | N/A | 7809 | 7825 | TTTTAACCTAGGAGTGG | 79 | 620 |
| 954337 | N/A | N/A | 8273 | 8289 | GCAAGAAGGGCTTTGTT | 102 | 621 |
| 954345 | N/A | N/A | 8320 | 8336 | CAAGAAACACTTTTGTT | 120 | 622 |
| 954353 | N/A | N/A | 8345 | 8361 | CATATTAAAATCTGGGA | 82 | 623 |
| 954361 | N/A | N/A | 8409 | 8425 | ATACATATGTAATGTGA | 97 | 624 |
| 954369 | N/A | N/A | 8462 | 8478 | AATTACAGGTACTGCTA | 101 | 625 |
| 954377 | N/A | N/A | 8474 | 8490 | GCAATTAATAAGAATTA | 93 | 626 |
| 954385 | N/A | N/A | 8546 | 8562 | CAAAAATGTGAGACCTT | 86 | 627 |
| 954393 | N/A | N/A | 8584 | 8600 | AGGTAGAGAGAATATGT | 109 | 628 |
| 954401 | N/A | N/A | 8641 | 8657 | TATCAAGTGGTTGACTT | 94 | 629 |
| 954409 | N/A | N/A | 8689 | 8705 | TCTGAATAAGACTAAAT | 111 | 630 |

TABLE 10
Reduction of HTT RNA by modified oligonucleotides with a mixed MOE/cEt sugar motif
and mixed PO/PS internucleoside linkages in A431 cells

| | SEQ | SEQ | SEQ | SEQ | | | |
|---|---|---|---|---|---|---|---|
| | ID No: | ID No: | ID No: | ID No: | | HTT | SEQ |
| Compound | 1 Start | 1 Stop | 2 Start | 2 Stop | | (% | ID |
| Number | Site | Site | Site | Site | Sequence (5′ to 3′) | UTC) | NO |
| 646253 | N/A | N/A | 1447 | 1463 | AGGGTTACCGCCATCCC | 111 | 78 |
| 953802 | N/A | N/A | 1408 | 1424 | GGACAGGGAGCTGCAGC | 95 | 631 |
| 953810 | N/A | N/A | 1626 | 1642 | CCCAACAAGGCTCTGCC | 87 | 632 |
| 953818 | N/A | N/A | 1761 | 1777 | CACAACGCAGTTAAAAG | 103 | 124 |
| 953826 | N/A | N/A | 1886 | 1902 | CCCCACATCTCTCCAGC | 109 | 633 |
| 953834 | N/A | N/A | 1966 | 1982 | GGACGCGCCCTCACTCC | 88 | 634 |
| 953842 | N/A | N/A | 2016 | 2032 | CTCAAATCTCAGGCTGT | 111 | 635 |
| 953850 | N/A | N/A | 2112 | 2128 | GCTTAGATGAGCAGATC | 97 | 636 |
| 953858 | N/A | N/A | 2194 | 2210 | AGATAATTTCATTAATC | 95 | 238 |
| 953866 | N/A | N/A | 2234 | 2250 | ACATAGGCAAAAAACTT | 92 | 637 |
| 953874 | N/A | N/A | 2316 | 2332 | GAATACTGGTAAAATGT | 112 | 638 |
| 953882 | N/A | N/A | 2417 | 2433 | TAACAAGCTGTCAGCAA | 106 | 639 |
| 953890 | N/A | N/A | 2454 | 2470 | CAAGAACAAGCAACAGA | 100 | 640 |
| 953898 | N/A | N/A | 2525 | 2541 | TTCCAGGGAAAGTCCTG | 86 | 641 |
| 953906 | N/A | N/A | 2610 | 2626 | GGAAATAGAATACTGAG | 67 | 642 |
| 953914 | N/A | N/A | 2656 | 2672 | TAACAGAGATATTCTTA | 111 | 643 |
| 953922 | N/A | N/A | 2675 | 2691 | ACTAAAAATTAATCAGT | 91 | 644 |
| 953930 | N/A | N/A | 2732 | 2748 | AATTAAACTTTGAAGAC | 109 | 645 |
| 953938 | N/A | N/A | 2769 | 2785 | AACAAATAAGCTAACAC | 98 | 646 |
| 953946 | N/A | N/A | 2819 | 2835 | CCAAAAAGTTTTTCCAT | 86 | 647 |
| 953954 | N/A | N/A | 2872 | 2888 | GAAATTACTTACTGAAG | 63 | 648 |
| 953962 | N/A | N/A | 2903 | 2919 | TAGAAAAGCACTACAGT | 79 | 649 |
| 953970 | N/A | N/A | 2947 | 2963 | CACAAGATACATGCAAT | 107 | 650 |
| 953978 | N/A | N/A | 3014 | 3030 | GATCAAGTGTCTGAAGC | 66 | 651 |
| 953986 | N/A | N/A | 3044 | 3060 | CATAAGAAAGAGAAGGC | 72 | 652 |
| 953994 | N/A | N/A | 3078 | 3094 | TGAAGATAAGCAAATGC | 90 | 653 |
| 954002 | N/A | N/A | 3116 | 3132 | GTCAAGGCAGCAAAGGA | 79 | 654 |
| 954010 | N/A | N/A | 3150 | 3166 | ACCTTAAAGTAATGAAA | 101 | 655 |
| 954018 | N/A | N/A | 3173 | 3189 | TTTAAATAAGGTAATCA | 96 | 656 |
| 954026 | N/A | N/A | 3538 | 3554 | TGTAATTACAGAATTTG | 80 | 657 |
| 954034 | N/A | N/A | 3626 | 3642 | AGGAACTGAAATAGTGC | 89 | 658 |
| 954042 | N/A | N/A | 3661 | 3677 | ACAATATGAACAGGTTA | 45 | 659 |
| 954050 | N/A | N/A | 3708 | 3724 | TATTATTCTAAACTACT | 102 | 660 |
| 954058 | N/A | N/A | 4060 | 4076 | ACCTAATGCAGTTGATT | 67 | 661 |
| 954066 | N/A | N/A | 4106 | 4122 | TGACAAATATGCATTTT | 60 | 662 |
| 954074 | N/A | N/A | 4156 | 4172 | CTCAAAATTAGTGAATA | 103 | 663 |
| 954082 | N/A | N/A | 4229 | 4245 | GAGAAGAGGATTTTTTG | 89 | 664 |
| 954090 | N/A | N/A | 4296 | 4312 | CACCAAAGAGCAAGAGC | 101 | 665 |
| 954098 | N/A | N/A | 4386 | 4402 | CCCCATAAGGAACTCCT | 113 | 666 |
| 954106 | N/A | N/A | 4460 | 4476 | AGCAAGTATTAATTGCC | 83 | 667 |
| 954114 | N/A | N/A | 4487 | 4503 | TCTGAAGGAGAATAAGA | 109 | 668 |
| 954122 | N/A | N/A | 4521 | 4537 | GAATGAATAAAGTCAGG | 82 | 669 |
| 954130 | N/A | N/A | 4571 | 4587 | CCTATAACAGTGCCAGG | 94 | 670 |
| 954138 | N/A | N/A | 4749 | 4765 | AATAAGTTAACACTCGA | 92 | 671 |
| 954146 | N/A | N/A | 5281 | 5297 | GATCACAAGGTCGGCGG | 126 | 672 |
| 954154 | N/A | N/A | 5542 | 5558 | AAAAAAGCTGTCTTCTC | 83 | 673 |
| 954162 | N/A | N/A | 5727 | 5743 | CTCAAAAGCCATCATCT | 89 | 674 |
| 954170 | N/A | N/A | 5819 | 5835 | AAACAGGAAGATTTTGG | 87 | 675 |
| 954178 | N/A | N/A | 5847 | 5863 | AACTAAAATGACATCCT | 88 | 676 |
| 954186 | N/A | N/A | 5939 | 5955 | TACAAGGCAAGTAGTAT | 95 | 677 |
| 954194 | N/A | N/A | 5969 | 5985 | TCACATAAATGCCAATA | 67 | 678 |
| 954202 | N/A | N/A | 6094 | 6110 | TCCTAACTGGTTTCTGC | 82 | 679 |
| 954210 | N/A | N/A | 6230 | 6246 | TGTTATACTTAGCAGAG | 74 | 680 |
| 954218 | N/A | N/A | 6263 | 6279 | ATACAAACCTGATAACG | 95 | 681 |
| 954226 | N/A | N/A | 6370 | 6386 | CTTAACTTATTGTTGAA | 107 | 682 |
| 954234 | N/A | N/A | 6716 | 6732 | TGCAAGGTAAGTATAAG | 79 | 683 |
| 954242 | N/A | N/A | 6837 | 6853 | CCAAAGGAAGGGAGAGT | 87 | 684 |
| 954250 | N/A | N/A | 6930 | 6946 | CAGCAACCAAAGACAAA | 88 | 685 |
| 954258 | N/A | N/A | 7088 | 7104 | AGAATAAAGTTGGACTT | 86 | 686 |
| 954266 | N/A | N/A | 7185 | 7201 | ACGATTAATTTTCAACA | 64 | 687 |
| 954274 | N/A | N/A | 7198 | 7214 | TATACAATTAAGGACGA | 63 | 688 |
| 954282 | N/A | N/A | 7242 | 7258 | GACATAAAGACCAACAG | 83 | 689 |
| 954290 | N/A | N/A | 7302 | 7318 | TGAATTTAAACTGTGAC | 64 | 690 |
| 954298 | N/A | N/A | 7502 | 7518 | TCATAGGTGGAAGACAA | 79 | 691 |
| 954306 | N/A | N/A | 7547 | 7563 | CCGAAATACTTACAATC | 71 | 692 |
| 954314 | N/A | N/A | 7630 | 7646 | ACTCATACATATTGCTT | 82 | 693 |
| 954322 | N/A | N/A | 7761 | 7777 | TCACAAGCTAAGAAATG | 103 | 694 |
| 954330 | N/A | N/A | 7816 | 7832 | TATCATATTTTAACCTA | 116 | 695 |
| 954338 | N/A | N/A | 8274 | 8290 | TGCAAGAAGGGCTTTGT | 96 | 696 |
| 954346 | N/A | N/A | 8322 | 8338 | CACAAGAAACACTTTTG | 103 | 697 |
| 954354 | N/A | N/A | 8346 | 8362 | GCATATTAAAATCTGGG | 73 | 698 |
| 954362 | N/A | N/A | 8410 | 8426 | AATACATATGTAATGTG | 95 | 699 |
| 954370 | N/A | N/A | 8463 | 8479 | GAATTACAGGTACTGCT | 71 | 700 |
| 954378 | N/A | N/A | 8475 | 8491 | AGCAATTAATAAGAATT | 82 | 701 |
| 954386 | N/A | N/A | 8547 | 8563 | ACAAAAATGTGAGACCT | 72 | 702 |
| 954394 | N/A | N/A | 8589 | 8605 | TCTCAAGGTAGAGAGAA | 88 | 703 |
| 954402 | N/A | N/A | 8653 | 8669 | TCAAAGGTAGTTTATCA | 83 | 704 |
| 954410 | N/A | N/A | 8722 | 8738 | CTTTATAAGGTATTTTA | 106 | 705 |

TABLE 11
Reduction of HTT RNA by modified oligonucleotides with a mixed MOE/cEt sugar motif
and mixed PO/PS internucleoside linkages in A431 cells

| | SEQ | SEQ | SEQ | SEQ | | | |
|---|---|---|---|---|---|---|---|
| | ID No: | ID No: | ID No: | ID No: | | HTT | SEQ |
| Compound | 1 Start | 1 Stop | 2 Start | 2 Stop | | (% | ID |
| Number | Site | Site | Site | Site | Sequence (5′ to 3′) | UTC) | NO |
| 646253 | N/A | N/A | 1447 | 1463 | AGGGTTACCGCCATCCC | 118 | 78 |
| 953803 | N/A | N/A | 1458 | 1474 | CCGCAGGCTGCAGGGTT | 97 | 706 |
| 953811 | N/A | N/A | 1627 | 1643 | CCCCAACAAGGCTCTGC | 136 | 707 |
| 953819 | N/A | N/A | 1762 | 1778 | TCACAACGCAGTTAAAA | 120 | 708 |
| 953827 | N/A | N/A | 1904 | 1920 | CATTATGTCATCCACTG | 76 | 709 |
| 953835 | N/A | N/A | 1973 | 1989 | TCCCATTGGACGCGCCC | 103 | 710 |
| 953843 | N/A | N/A | 2033 | 2049 | GACAATGTAGGAAGAGC | 88 | 711 |
| 953851 | N/A | N/A | 2117 | 2133 | CTTAGGCTTAGATGAGC | 135 | 712 |
| 953859 | N/A | N/A | 2205 | 2221 | CCTAATATTTAAGATAA | 92 | 240 |
| 953867 | N/A | N/A | 2235 | 2251 | CACATAGGCAAAAAACT | 94 | 250 |
| 953875 | N/A | N/A | 2318 | 2334 | TGGAATACTGGTAAAAT | 122 | 713 |
| 953883 | N/A | N/A | 2424 | 2440 | CAAAAAGTAACAAGCTG | 98 | 714 |
| 953891 | N/A | N/A | 2455 | 2471 | CCAAGAACAAGCAACAG | 141 | 715 |
| 953899 | N/A | N/A | 2544 | 2560 | GTACACTCGACACACAG | 86 | 716 |
| 953907 | N/A | N/A | 2611 | 2627 | CGGAAATAGAATACTGA | 109 | 717 |
| 953915 | N/A | N/A | 2658 | 2674 | CTTAACAGAGATATTCT | 123 | 718 |
| 953923 | N/A | N/A | 2689 | 2705 | GAACAAGAAATATTACT | 132 | 719 |
| 953931 | N/A | N/A | 2733 | 2749 | TAATTAAACTTTGAAGA | 92 | 720 |
| 953939 | N/A | N/A | 2770 | 2786 | CAACAAATAAGCTAACA | 105 | 721 |
| 953947 | N/A | N/A | 2820 | 2836 | TCCAAAAAGTTTTTCCA | 93 | 722 |
| 953955 | N/A | N/A | 2889 | 2905 | AGTAAATTTCTGGATGA | 92 | 723 |
| 953963 | N/A | N/A | 2904 | 2920 | CTAGAAAAGCACTACAG | 118 | 724 |
| 953971 | N/A | N/A | 2948 | 2964 | ACACAAGATACATGCAA | 123 | 725 |
| 953979 | N/A | N/A | 3021 | 3037 | TTAGAATGATCAAGTGT | 64 | 726 |
| 953987 | N/A | N/A | 3045 | 3061 | GCATAAGAAAGAGAAGG | 85 | 727 |
| 953995 | N/A | N/A | 3079 | 3095 | TTGAAGATAAGCAAATG | 103 | 728 |
| 954003 | N/A | N/A | 3117 | 3133 | TGTCAAGGCAGCAAAGG | 88 | 729 |
| 954011 | N/A | N/A | 3156 | 3172 | TATATTACCTTAAAGTA | 113 | 730 |
| 954019 | N/A | N/A | 3217 | 3233 | TCGGATTAAAGGTGTAA | 127 | 731 |
| 954027 | N/A | N/A | 3554 | 3570 | TTAATTATTGCCCTTTT | 55 | 732 |
| 954035 | N/A | N/A | 3633 | 3649 | ATACATGAGGAACTGAA | 75 | 733 |
| 954043 | N/A | N/A | 3662 | 3678 | TACAATATGAACAGGTT | 63 | 734 |
| 954051 | N/A | N/A | 3709 | 3725 | ATATTATTCTAAACTAC | 124 | 735 |
| 954059 | N/A | N/A | 4065 | 4081 | AATAAACCTAATGCAGT | 130 | 736 |
| 954067 | N/A | N/A | 4119 | 4135 | ATACAGAGAAATATGAC | 122 | 737 |
| 954075 | N/A | N/A | 4157 | 4173 | ACTCAAAATTAGTGAAT | 137 | 738 |
| 954083 | N/A | N/A | 4244 | 4260 | CATCAATCTTACTTTGA | 106 | 739 |
| 954091 | N/A | N/A | 4336 | 4352 | ATAAACTGAGGCCCATG | 133 | 740 |
| 954099 | N/A | N/A | 4413 | 4429 | TGCTAGATTTGCTGAGC | 120 | 741 |
| 954107 | N/A | N/A | 4461 | 4477 | AAGCAAGTATTAATTGC | 98 | 742 |
| 954115 | N/A | N/A | 4497 | 4513 | CAGATAGGAATCTGAAG | 116 | 743 |
| 954123 | N/A | N/A | 4524 | 4540 | GATGAATGAATAAAGTC | 60 | 744 |
| 954131 | N/A | N/A | 4572 | 4588 | ACCTATAACAGTGCCAG | 103 | 745 |
| 954139 | N/A | N/A | 4750 | 4766 | AAATAAGTTAACACTCG | 83 | 746 |
| 954147 | N/A | N/A | 5498 | 5514 | AAAATATCAACACTGGC | 159 | 747 |
| 954155 | N/A | N/A | 5585 | 5601 | TTAAAGAGCAAGACCTT | 114 | 748 |
| 954163 | N/A | N/A | 5750 | 5766 | TCTTAACTCGCTTGAGG | 118 | 749 |
| 954171 | N/A | N/A | 5820 | 5836 | GAAACAGGAAGATTTTG | 104 | 750 |
| 954179 | N/A | N/A | 5850 | 5866 | CCCAACTAAAATGACAT | 109 | 751 |
| 954187 | N/A | N/A | 5940 | 5956 | CTACAAGGCAAGTAGTA | 92 | 752 |
| 954195 | N/A | N/A | 5971 | 5987 | ACTCACATAAATGCCAA | 110 | 753 |
| 954203 | N/A | N/A | 6132 | 6148 | ACAGAACCCACCATGCT | 103 | 754 |
| 954211 | N/A | N/A | 6236 | 6252 | CTAAATTGTTATACTTA | 102 | 755 |
| 954219 | N/A | N/A | 6268 | 6284 | GCTGAATACAAACCTGA | 79 | 756 |
| 954227 | N/A | N/A | 6389 | 6405 | AAAGAAAGAGCCTGGGT | 85 | 757 |
| 954235 | N/A | N/A | 6717 | 6733 | TTGCAAGGTAAGTATAA | 108 | 758 |
| 954243 | N/A | N/A | 6838 | 6854 | TCCAAAGGAAGGGAGAG | 130 | 759 |
| 954251 | N/A | N/A | 6951 | 6967 | TTAGATATGACACTTGA | 103 | 760 |
| 954259 | N/A | N/A | 7161 | 7177 | TAAGATAATTCCATGGG | 112 | 761 |
| 954267 | N/A | N/A | 7186 | 7202 | GACGATTAATTTTCAAC | 100 | 762 |
| 954275 | N/A | N/A | 7199 | 7215 | TTATACAATTAAGGACG | 101 | 763 |
| 954283 | N/A | N/A | 7243 | 7259 | CGACATAAAGACCAACA | 96 | 764 |
| 954291 | N/A | N/A | 7304 | 7320 | CATGAATTTAAACTGTG | 87 | 765 |
| 954299 | N/A | N/A | 7520 | 7536 | CACAAAGTTTGCCCATG | 75 | 766 |
| 954307 | N/A | N/A | 7548 | 7564 | CCCGAAATACTTACAAT | 106 | 767 |
| 954315 | N/A | N/A | 7640 | 7656 | GAACACAGACACTCATA | 119 | 768 |
| 954323 | N/A | N/A | 7780 | 7796 | CTGCATATTTTTGGCTA | 152 | 769 |
| 954331 | N/A | N/A | 7830 | 7846 | TCCAAATGTGGTCCTAT | 103 | 770 |
| 954339 | N/A | N/A | 8290 | 8306 | ACAAAGATGACAGACTT | 68 | 771 |
| 954347 | N/A | N/A | 8323 | 8339 | ACACAAGAAACACTTTT | 83 | 772 |
| 954355 | N/A | N/A | 8347 | 8363 | TGCATATTAAAATCTGG | 94 | 773 |
| 954363 | N/A | N/A | 8433 | 8449 | TATGACACATTGTTAAG | 147 | 774 |
| 954371 | N/A | N/A | 8464 | 8480 | AGAATTACAGGTACTGC | 116 | 775 |
| 954379 | N/A | N/A | 8476 | 8492 | TAGCAATTAATAAGAAT | 104 | 776 |
| 954387 | N/A | N/A | 8548 | 8564 | CACAAAAATGTGAGACC | 111 | 777 |
| 954395 | N/A | N/A | 8618 | 8634 | AGGAAATGGAGGTGATG | 76 | 778 |
| 954403 | N/A | N/A | 8654 | 8670 | TTCAAAGGTAGTTTATC | 149 | 779 |
| 954411 | N/A | N/A | 8723 | 8739 | GCTTTATAAGGTATTTT | 82 | 780 |

TABLE 12
Reduction of HTT RNA by modified oligonucleotides with a mixed MOE/cEt sugar motif
and mixed PO/PS internucleoside linkages in A431 cells

| | SEQ | SEQ | SEQ | SEQ | | | |
|---|---|---|---|---|---|---|---|
| | ID No: | ID No: | ID No: | ID No: | | HTT | SEQ |
| Compound | 1 Start | 1 Stop | 2 Start | 2 Stop | | (% | ID |
| Number | Site | Site | Site | Site | Sequence (5′ to 3′) | UTC) | NO |
| 646253 | N/A | N/A | 1447 | 1463 | AGGGTTACCGCCATCCC | 97 | 78 |
| 953804 | N/A | N/A | 1583 | 1599 | CCCAAGTGAGGGAGCGG | 98 | 781 |
| 953812 | N/A | N/A | 1674 | 1690 | GGCGAGAGGGCTGAGGC | 114 | 782 |
| 953820 | N/A | N/A | 1798 | 1814 | TGGCACTGAGCAAATCT | 89 | 783 |
| 953828 | N/A | N/A | 1905 | 1921 | GCATTATGTCATCCACT | 101 | 784 |
| 953836 | N/A | N/A | 1978 | 1994 | AAATCTCCCATTGGACG | 92 | 785 |
| 953844 | N/A | N/A | 2034 | 2050 | TGACAATGTAGGAAGAG | 99 | 786 |
| 953852 | N/A | N/A | 2123 | 2139 | GACCAACTTAGGCTTAG | 97 | 787 |
| 953860 | N/A | N/A | 2206 | 2222 | TCCTAATATTTAAGATA | 133 | 788 |
| 953868 | N/A | N/A | 2236 | 2252 | ACACATAGGCAAAAAAC | 87 | 789 |
| 953876 | N/A | N/A | 2361 | 2377 | GCCCACGGAGTCTGCGG | 100 | 790 |
| 953884 | N/A | N/A | 2425 | 2441 | CCAAAAAGTAACAAGCT | 100 | 791 |
| 953892 | N/A | N/A | 2456 | 2472 | CCCAAGAACAAGCAACA | 87 | 792 |
| 953900 | N/A | N/A | 2551 | 2567 | TCCTACTGTACACTCGA | 91 | 793 |
| 953908 | N/A | N/A | 2612 | 2628 | TCGGAAATAGAATACTG | 145 | 794 |
| 953916 | N/A | N/A | 2659 | 2675 | TCTTAACAGAGATATTC | 89 | 795 |
| 953924 | N/A | N/A | 2707 | 2723 | GATCATAACAGAAACAA | 136 | 796 |
| 953932 | N/A | N/A | 2735 | 2751 | TCTAATTAAACTTTGAA | 86 | 797 |
| 953940 | N/A | N/A | 2783 | 2799 | CTAAATTTTATTCCAAC | 79 | 798 |
| 953948 | N/A | N/A | 2821 | 2837 | ATCCAAAAAGTTTTTCC | 97 | 799 |
| 953956 | N/A | N/A | 2890 | 2906 | CAGTAAATTTCTGGATG | 82 | 800 |
| 953964 | N/A | N/A | 2905 | 2921 | CCTAGAAAAGCACTACA | 109 | 801 |
| 953972 | N/A | N/A | 2950 | 2966 | TTACACAAGATACATGC | 93 | 802 |
| 953980 | N/A | N/A | 3023 | 3039 | TTTTAGAATGATCAAGT | 74 | 803 |
| 953988 | N/A | N/A | 3054 | 3070 | GTCAAATCAGCATAAGA | 118 | 804 |
| 953996 | N/A | N/A | 3084 | 3100 | ATATTTTGAAGATAAGC | 101 | 805 |
| 954004 | N/A | N/A | 3133 | 3149 | CAAAATCTATCTCCTTT | 120 | 806 |
| 954012 | N/A | N/A | 3159 | 3175 | TCATATATTACCTTAAA | 115 | 807 |
| 954020 | N/A | N/A | 3510 | 3526 | TGTATTACTTATGCAAA | 89 | 808 |
| 954028 | N/A | N/A | 3557 | 3573 | ATTTTAATTATTGCCCT | 70 | 809 |
| 954036 | N/A | N/A | 3634 | 3650 | GATACATGAGGAACTGA | 108 | 810 |
| 954044 | N/A | N/A | 3663 | 3679 | TTACAATATGAACAGGT | 46 | 811 |
| 954052 | N/A | N/A | 3747 | 3763 | GACAATGTGAGACTACA | 103 | 812 |
| 954060 | N/A | N/A | 4066 | 4082 | AAATAAACCTAATGCAG | 130 | 813 |
| 954068 | N/A | N/A | 4124 | 4140 | GCAAAATACAGAGAAAT | 63 | 814 |
| 954076 | N/A | N/A | 4184 | 4200 | ATCCAAACTTTGTGAGC | 140 | 815 |
| 954084 | N/A | N/A | 4269 | 4285 | GAACAGATACTTTCTAA | 111 | 816 |
| 954092 | N/A | N/A | 4337 | 4353 | CATAAACTGAGGCCCAT | 118 | 817 |
| 954100 | N/A | N/A | 4422 | 4438 | TCCCAAGCATGCTAGAT | 122 | 818 |
| 954108 | N/A | N/A | 4465 | 4481 | CCAGAAGCAAGTATTAA | 88 | 819 |
| 954116 | N/A | N/A | 4500 | 4516 | CACCAGATAGGAATCTG | 110 | 820 |
| 954124 | N/A | N/A | 4533 | 4549 | ATATTTACTGATGAATG | 95 | 821 |
| 954132 | N/A | N/A | 4612 | 4628 | CACGAGGGCAGAGCTTT | 79 | 822 |
| 954140 | N/A | N/A | 4751 | 4767 | AAAATAAGTTAACACTC | 126 | 823 |
| 954148 | N/A | N/A | 5499 | 5515 | TAAAATATCAACACTGG | 104 | 824 |
| 954156 | N/A | N/A | 5614 | 5630 | ACGATAGTGATACTGCA | 79 | 825 |
| 954164 | N/A | N/A | 5761 | 5777 | TTACACTAGACTCTTAA | 85 | 826 |
| 954172 | N/A | N/A | 5821 | 5837 | TGAAACAGGAAGATTTT | 138 | 827 |
| 954180 | N/A | N/A | 5851 | 5867 | ACCCAACTAAAATGACA | 102 | 828 |
| 954188 | N/A | N/A | 5942 | 5958 | ATCTACAAGGCAAGTAG | 105 | 829 |
| 954196 | N/A | N/A | 6027 | 6043 | TTGAAATTCAGATCATG | 117 | 830 |
| 954204 | N/A | N/A | 6186 | 6202 | CAAAATCCAGTCAGTCA | 77 | 831 |
| 954212 | N/A | N/A | 6237 | 6253 | GCTAAATTGTTATACTT | 82 | 832 |
| 954220 | N/A | N/A | 6269 | 6285 | AGCTGAATACAAACCTG | 80 | 833 |
| 954228 | N/A | N/A | 6703 | 6719 | TAAGAAAGAGCCTGGGT | 148 | 834 |
| 954236 | N/A | N/A | 6726 | 6742 | AACAAGGGTTTGCAAGG | 116 | 835 |
| 954244 | N/A | N/A | 6839 | 6855 | ATCCAAAGGAAGGGAGA | 99 | 836 |
| 954252 | N/A | N/A | 6988 | 7004 | AGTAAACCTTTTTGACT | 105 | 837 |
| 954260 | N/A | N/A | 7162 | 7178 | CTAAGATAATTCCATGG | 109 | 838 |
| 954268 | N/A | N/A | 7190 | 7206 | TAAGGACGATTAATTTT | 126 | 839 |
| 954276 | N/A | N/A | 7201 | 7217 | ATTTATACAATTAAGGA | 126 | 840 |
| 954284 | N/A | N/A | 7244 | 7260 | TCGACATAAAGACCAAC | 125 | 841 |
| 954292 | N/A | N/A | 7350 | 7366 | GGCCAAATCAATCTTGA | 91 | 842 |
| 954300 | N/A | N/A | 7521 | 7537 | ACACAAAGTTTGCCCAT | 80 | 843 |
| 954308 | N/A | N/A | 7549 | 7565 | GCCCGAAATACTTACAA | 125 | 844 |
| 954316 | N/A | N/A | 7656 | 7672 | TAATAAAATTCTATTGG | 128 | 845 |
| 954324 | N/A | N/A | 7787 | 7803 | CTATAACCTGCATATTT | 98 | 846 |
| 954332 | N/A | N/A | 7976 | 7992 | TACTAGGGAGGCCGTGC | 143 | 847 |
| 954340 | N/A | N/A | 8291 | 8307 | GACAAAGATGACAGACT | 100 | 848 |
| 954348 | N/A | N/A | 8327 | 8343 | GAAGACACAAGAAACAC | 129 | 849 |
| 954356 | N/A | N/A | 8348 | 8364 | ATGCATATTAAAATCTG | 102 | 850 |
| 954364 | N/A | N/A | 8440 | 8456 | CAATATCTATGACACAT | 48 | 851 |
| 954372 | N/A | N/A | 8465 | 8481 | AAGAATTACAGGTACTG | 74 | 852 |
| 954380 | N/A | N/A | 8489 | 8505 | CTAAAATATTACATAGC | 96 | 853 |
| 954388 | N/A | N/A | 8549 | 8565 | CCACAAAAATGTGAGAC | 87 | 854 |
| 954396 | N/A | N/A | 8622 | 8638 | TTACAGGAAATGGAGGT | 97 | 855 |
| 954404 | N/A | N/A | 8655 | 8671 | ATTCAAAGGTAGTTTAT | 106 | 856 |
| 954412 | N/A | N/A | 8724 | 8740 | TGCTTTATAAGGTATTT | 78 | 857 |

### Example 3: Effect of 5-10-5 MOE Mixed Backbone Modified Oligonucleotides on Human HTT RNA In Vitro, Single Dose

[0485] Modified oligonucleotides complementary to human HTT nucleic acid were designed and tested for their single dose effects on HTT RNA in vitro. The modified oligonucleotides were tested in a series of experiments that had the same culture conditions.

[0486] The modified oligonucleotides in the tables below are 5-10-5 MOE gapmers with mixed PO/PS internucleoside linkages. The gapmers are 20 nucleosides in length, wherein the sugar motif for the gapmers is (from 5′ to 3′): eeeeeddddddddddeeeee; wherein each “d” represents a 2′-β-D-deoxyribosyl sugar, and each “e” represents a 2′-MOE sugar moiety. The internucleoside linkage motif for the gapmers is (from 5′ to 3′): sooosssssssssssooss; wherein each “o” represents a phosphodiester internucleoside linkage, and each “s” represents a phosphorothioate internucleoside linkage. Each cytosine residue is a 5-methylcytosine.

[0487] “Start site” indicates the 5′-most nucleoside to which the modified oligonucleotide is complementary in the target nucleic acid sequence. “Stop site” indicates the 3′-most nucleoside to which the modified oligonucleotide is complementary in the target nucleic acid sequence. Each modified oligonucleotide listed in the tables below is 100% complementary to SEQ ID NO: 1 (described herein above), to SEQ ID NO: 2 (described herein above), or to both. ‘N/A’ indicates that the modified oligonucleotide is not 100% complementary to that particular target nucleic acid sequence.

[0488] Cultured A431 cells were treated with modified oligonucleotide at a concentration of 2000 nM by free uptake at a density of 10,000 cells per well. After a treatment period of approximately 48 hours, total RNA was isolated from the cells and HTT RNA levels were measured by quantitative real-time RTPCR. HTT RNA levels were measured by human primer probe set RTS36478 (forward sequence ACCCTTGCAGAGATTGACTT, designated herein as SEQ ID NO: 17; reverse sequence AGCACTCGTTCTTGCAGTT, designated herein as SEQ ID NO: 18; probe sequence TTTGCCTCCAAAAAGCTCACCAGC, designated herein as SEQ ID NO: 19). HTT RNA levels were normalized to total RNA content, as measured by RIBOGREEN®. Reduction of HTT RNA is presented in the tables below as percent HTT RNA relative to the amount of the HTT RNA in untreated control cells (% UTC). Each table represents results from an individual assay plate. The values marked with a “t” indicate that the modified oligonucleotide is complementary to the amplicon region of the primer probe set. Additional assays may be used to measure the potency and efficacy of the modified oligonucleotides complementary to the amplicon region.

[0489] In the tables below, Compound 388241 was used as a comparator compound. Compound 388241 is 20 nucleosides in length, wherein the sugar motif is (from 5′ to 3′): eeeeeddddddddddeeeee; wherein each “d” represents a 2′-β-D-deoxyribosyl sugar, and each “e” represents a 2′-MOE sugar moiety. The internucleoside linkage motif for Compound 388241 is (from 5′ to 3′): sssssssssssssssssss; wherein each “s” represents a phosphorothioate internucleoside linkage. Each cytosine residue is a 5-methylcytosine.

TABLE 13
Reduction of HTT RNA by 5-10-5 MOE gapmers with mixed PO/PS internucleoside
linkages in A431 cells

| | SEQ | SEQ | SEQ | SEQ | | | |
|---|---|---|---|---|---|---|---|
| | ID No: | ID No: | ID No: | ID No: | | HTT | SEQ |
| Compound | 1 Start | 1 Stop | 2 Start | 2 Stop | | (% | ID |
| Number | Site | Site | Site | Site | Sequence (5′ to 3′) | UTC) | NO |
| 388241 | 4862 | 4881 | 106917 | 106936 | CTCAGTAACATTGACACCAC | 19 | 858 |
| 1314495 | N/A | N/A | 3136 | 3155 | ATGAAACAAAATCTATCTCC | 82 | 859 |
| 1314500 | N/A | N/A | 129817 | 129836 | AAAACACTTCTTCCCCACTA | 54 | 860 |
| 1314528 | N/A | N/A | 46677 | 46696 | TGAATTTATTCTTTTTCCCT | 78 | 861 |
| 1314530 | N/A | N/A | 117826 | 117845 | CTGAAACCATAATTAAGTCA | 46 | 862 |
| 1314541 | N/A | N/A | 70544 | 70563 | ACAAAAGTTATACTTGCTCA | 12 | 863 |
| 1314544 | N/A | N/A | 60439 | 60458 | GTCATGGTTTCAACTCTCAA | 17 | 864 |
| 1314545 | N/A | N/A | 17085 | 17104 | TATGTATTTATTCTTGCAGT | 45 | 865 |
| 1314560 | N/A | N/A | 81880 | 81899 | TACACATATTTCAAACATCA | 55 | 866 |
| 1314580 | N/A | N/A | 68687 | 68706 | CATGTCAATTTCTATCCCCC | 25 | 867 |
| 1314618 | N/A | N/A | 17819 | 17838 | GTCAATACTTTCCCCAAGTT | 32 | 868 |
| 1314639 | N/A | N/A | 45022 | 45041 | CCCTTTTTTCCCCTTCACCC | 73 | 869 |
| 1314667 | N/A | N/A | 59084 | 59103 | AGCAACAAACATCATCATCT | 89 | 870 |
| 1314669 | N/A | N/A | 100946 | 100965 | GCACTCAGATATACTCCTGC | 79 | 871 |
| 1314691 | N/A | N/A | 34537 | 34556 | TTATTCCAAATCATTCAGCT | 68 | 872 |
| 1314751 | N/A | N/A | 10437 | 10456 | ACCACATTCACCTCCCTCTC | 66 | 873 |
| 1314769 | N/A | N/A | 56771 | 56790 | GCGATTTTAAATCCTCACAC | 54 | 874 |
| 1314774 | N/A | N/A | 111471 | 111490 | GCCAACTTAACCCATTGCCG | 40 | 875 |
| 1314793 | N/A | N/A | 48882 | 48901 | CAGTCAAGTATAACTTTTCA | 29 | 876 |
| 1314851 | N/A | N/A | 53293 | 53312 | AGTTCAAGTTCTTAACCGAC | 25 | 877 |
| 1314870 | N/A | N/A | 130450 | 130469 | AGGCATTTCAAACTTACGAC | 25 | 878 |
| 1314943 | N/A | N/A | 65893 | 65912 | ACTATTTTATCATATTGGTC | 19 | 879 |
| 1314955 | 2872 | 2891 | 62554 | 62573 | GGATGACAACATTATTGAGC | 3† | 880 |
| 1314959 | N/A | N/A | 25031 | 25050 | GTATAACCATATTTCACCCT | 46 | 881 |
| 1314969 | N/A | N/A | 142119 | 142138 | GCCACCATTTTCCTAGTAAA | 43 | 882 |
| 1315018 | N/A | N/A | 56029 | 56048 | CACTCATTCCCACTACATTA | 53 | 883 |
| 1315039 | N/A | N/A | 136561 | 136580 | CCAGATAGTTCTCATCCCAA | 10 | 884 |
| 1315041 | N/A | N/A | 114520 | 114539 | AGACTCACTTTTACTGGCTT | 21 | 885 |
| 1315070 | N/A | N/A | 12554 | 12573 | CTGTATTTCACCAATACTCA | 68 | 886 |
| 1315074 | N/A | N/A | 108167 | 108186 | GCACAAGTTTATTAGTGATC | 9 | 887 |
| 1315076 | N/A | N/A | 7428 | 7447 | TCTCAGAATCCTACTTGGCT | 62 | 888 |
| 1315087 | N/A | N/A | 5891 | 5910 | TTGGACCTTACTTCTTACTA | 49 | 889 |
| 1315110 | N/A | N/A | 104193 | 104212 | GGGAACACTTTCCTTCTGCA | 64 | 890 |
| 1315144 | 3320 | 3339 | 73126 | 73145 | GTACAGCTCTTCCTAGACTC | 27 | 891 |
| 1315202 | N/A | N/A | 94641 | 94660 | TCACCTCTCCAGCTACACTT | 90 | 892 |
| 1315204 | N/A | N/A | 133712 | 133731 | CCGTACAAATCTATATCCTT | 31 | 893 |
| 1315444 | N/A | N/A | 45574 | 45593 | TGGATGGTTACTAATTGCCT | 49 | 894 |
| 1315451 | N/A | N/A | 19656 | 19675 | TCTCTTTTTAATATTAGGTA | 77 | 895 |
| 1315474 | N/A | N/A | 41859 | 41878 | TTCACATTCAATCAACCAGT | 65 | 896 |
| 1315506 | N/A | N/A | 20046 | 20065 | TTCATCACTCCAATTTTCAA | 88 | 897 |
| 1315527 | N/A | N/A | 106954 | 106973 | AACATACATTCCTCTTACCT | 84 | 898 |
| 1315544 | N/A | N/A | 134658 | 134677 | CTGATAGGAATTCATGGTCA | 25 | 899 |
| 1315615 | N/A | N/A | 110081 | 110100 | AGTCAGGTATTTACTATGTA | 23 | 900 |
| 1315620 | N/A | N/A | 105918 | 105937 | ACTCTGACCCCTCAGTGACA | 94 | 901 |
| | | | 105969 | 105988 | | | |
| | | | 106024 | 106043 | | | |
| 1315688 | N/A | N/A | 18989 | 19008 | GTCACAAATATAAATATCTA | 78 | 902 |
| 1315692 | N/A | N/A | 69357 | 69376 | GTCATTTACATTCCTGGAGT | 16 | 903 |
| 1315714 | N/A | N/A | 125875 | 125894 | TTCTGATTTTTCTAAGCAGA | 91 | 904 |
| 1315804 | N/A | N/A | 75430 | 75449 | AGGACAGTAGCCATTAACCA | 33 | 905 |
| 1315847 | N/A | N/A | 51146 | 51165 | TGGGAATTTCTAATTTCTGC | 23 | 906 |
| 1315992 | N/A | N/A | 160801 | 160820 | CAGCCCAACACACCAGCACA | 92 | 907 |
| 1316076 | N/A | N/A | 33828 | 33847 | CGACATACAACATACCCCAA | 84 | 908 |
| 1316148 | N/A | N/A | 43578 | 43597 | GCTACACCCTTTTTACTCAA | 34 | 909 |
| 1316158 | N/A | N/A | 26702 | 26721 | AAGCAAAGATTCCCTGGGCA | 86 | 910 |
| 1316180 | N/A | N/A | 149496 | 149515 | GCAAAAGCCCATTTTTCAAA | 93 | 911 |
| 1316335 | N/A | N/A | 9945 | 9964 | TTCTAAATCCTCACCAGCAT | 54 | 912 |
| 1316376 | N/A | N/A | 118118 | 118137 | ACAACTTTAGACATCACCCA | 54 | 913 |
| 1316405 | N/A | N/A | 138747 | 138766 | GACATTGTTCCTCAGTGGCA | 53 | 914 |
| 1316523 | N/A | N/A | 116031 | 116050 | GGTCCTCTTAACTATTTTTA | 76 | 915 |
| 1316576 | N/A | N/A | 40111 | 40130 | ACTTCTCTCCTTGCCAGCCA | 55 | 916 |
| 1316597 | N/A | N/A | 22579 | 22598 | GGCTACTGAAATCTCTATCA | 28 | 917 |
| 1316688 | N/A | N/A | 81002 | 81021 | CCATCACCTGCAACCAGGGA | 99 | 918 |
| 1316689 | N/A | N/A | 119649 | 119668 | AAGCCATATTTTCTCAACTT | 36 | 919 |
| 1316695 | N/A | N/A | 35427 | 35446 | AGGAAGGGAACTACTATCTT | 50 | 920 |
| 1316719 | N/A | N/A | 23097 | 23116 | GCTTGTCATTTTCAAGTTTC | 73 | 921 |
| 1316747 | N/A | N/A | 47423 | 47442 | GACAAAGTTTATACCTTAAC | 38 | 922 |
| 1316813 | N/A | N/A | 52749 | 52768 | GGATTATACAACCAAAACCA | 78 | 923 |
| 1316816 | N/A | N/A | 32332 | 32351 | GGGTTTAGACCACATTCCCA | 86 | 924 |
| 1316869 | N/A | N/A | 83780 | 83799 | ACACGGATCCCTCCAGACTC | 97 | 925 |
| 1316872 | 12480 | 12499 | 169229 | 169248 | CTTCACATTTTCCCCTTGAA | 68 | 926 |
| 1316933 | N/A | N/A | 72510 | 72529 | GTAAGTCAAACTACCAAGCA | 32 | 927 |
| 1316988 | N/A | N/A | 127367 | 127386 | AACTAAATTTACCTTTGGTT | 85 | 928 |
| 1316999 | N/A | N/A | 22171 | 22190 | GAAATCTACCATCAAGCTCT | 61 | 929 |
| 1317036 | N/A | N/A | 132358 | 132377 | ACTCTTTTTCCAATTTTGTG | 32 | 930 |
| 1317065 | N/A | N/A | 79756 | 79775 | ATCGAGACTCCCAATGCTCT | 79 | 931 |
| 1317087 | N/A | N/A | 14033 | 14052 | AACATGAATTATTTATTCCA | 63 | 932 |
| 1317119 | 7435 | 7454 | 146527 | 146546 | TCTCAGGGAATGCTGTGCCA | 47 | 933 |
| 1317177 | N/A | N/A | 15545 | 15564 | GTAAAGATAACATATAGCTT | 51 | 934 |
| 1317181 | N/A | N/A | 98526 | 98545 | ACAAGATAACTTCCATTTAA | 72 | 935 |

TABLE 14
Reduction of HTT RNA by 5-10-5 MOE gapmers with mixed PO/PS internucleoside
linkages in A431 cells

| | SEQ | SEQ | SEQ | SEQ | | | |
|---|---|---|---|---|---|---|---|
| | ID No: | ID No: | ID No: | ID No: | | HTT | SEQ |
| Compound | 1 Start | 1 Stop | 2 Start | 2 Stop | | (% | ID |
| Number | Site | Site | Site | Site | Sequence (5′ to 3′) | UTC) | NO |
| 388241 | 4862 | 4881 | 106917 | 106936 | CTCAGTAACATTGACACCAC | 27 | 858 |
| 1314513 | N/A | N/A | 7351 | 7370 | GCATGGCCAAATCAATCTTG | 57 | 936 |
| 1314581 | N/A | N/A | 70467 | 70486 | CCCAAAATTTATCTTGGTGA | 49 | 937 |
| 1314632 | N/A | N/A | 81349 | 81368 | GCAGCAGTCACTTCATGCTT | 89 | 938 |
| 1314701 | 12479 | 12498 | 169228 | 169247 | TTCACATTTTCCCCTTGAAA | 70 | 939 |
| 1314723 | N/A | N/A | 119647 | 119666 | GCCATATTTTCTCAACTTTA | 19 | 940 |
| 1314754 | N/A | N/A | 52744 | 52763 | ATACAACCAAAACCACCCTC | 84 | 941 |
| 1314780 | N/A | N/A | 60433 | 60452 | GTTTCAACTCTCAAACAGCA | 80 | 942 |
| 1314831 | N/A | N/A | 20042 | 20061 | TCACTCCAATTTTCAAGGCC | 64 | 943 |
| 1314877 | N/A | N/A | 46668 | 46687 | TCTTTTTCCCTITAATTACA | 73 | 944 |
| 1314879 | N/A | N/A | 59083 | 59102 | GCAACAAACATCATCATCTA | 98 | 945 |
| 1314917 | N/A | N/A | 133711 | 133730 | CGTACAAATCTATATCCTTT | 43 | 946 |
| 1314938 | N/A | N/A | 48879 | 48898 | TCAAGTATAACTTTTCATTA | 61 | 947 |
| 1314995 | N/A | N/A | 138746 | 138765 | ACATTGTTCCTCAGTGGCAC | 88 | 948 |
| 1315026 | N/A | N/A | 18304 | 18323 | ATCTTAAATTTTCAATCCCC | 62 | 949 |
| 1315189 | N/A | N/A | 9909 | 9928 | GATCTTTTCATCTAAATGCA | 42 | 950 |
| 1315212 | N/A | N/A | 130449 | 130468 | GGCATTTCAAACTTACGACA | 42 | 951 |
| 1315238 | 3310 | 3329 | 73116 | 73135 | TCCTAGACTCATCTGAGGCA | 71 | 952 |
| 1315263 | N/A | N/A | 34527 | 34546 | TCATTCAGCTAATAAGAGCA | 74 | 953 |
| 1315281 | N/A | N/A | 19563 | 19582 | GCTGAGGTTTTCCACTCCAA | 70 | 954 |
| 1315293 | N/A | N/A | 26588 | 26607 | AAGAACACTTCTTACCACTT | 82 | 955 |
| 1315328 | N/A | N/A | 35423 | 35442 | AGGGAACTACTATCTTTGTT | 46 | 956 |
| 1315371 | N/A | N/A | 15450 | 15469 | ACAGTGTTTCACATGTACCA | 55 | 957 |
| 1315479 | N/A | N/A | 80880 | 80899 | TCTGTGTACATCAGTCATTA | 67 | 958 |
| 1315481 | N/A | N/A | 106953 | 106972 | ACATACATTCCTCTTACCTG | 93 | 959 |
| 1315513 | N/A | N/A | 114499 | 114518 | TCTTGGGTTTCAACTTCCCT | 77 | 960 |
| 1315549 | N/A | N/A | 14032 | 14051 | ACATGAATTATTTATTCCAA | 81 | 961 |
| 1315658 | N/A | N/A | 24894 | 24913 | GTTTAGGCCATCATGCTCCA | 57 | 962 |
| 1315673 | N/A | N/A | 55910 | 55929 | CACAAACAAATTTTACAGCA | 49 | 963 |
| 1315726 | N/A | N/A | 65817 | 65836 | GTAGAATTTTTTCTAGAATA | 88 | 964 |
| 1315736 | N/A | N/A | 62528 | 62547 | TCTTGCAGTTTTAAAAGCTT | 61† | 965 |
| 1315853 | N/A | N/A | 45021 | 45040 | CCTTTTTTCCCCTTCACCCT | 80 | 966 |
| 1315866 | N/A | N/A | 94540 | 94559 | AGCAAGGTCACAGATAAGGC | 62 | 967 |
| 1315872 | N/A | N/A | 129797 | 129816 | ACACAGGTTATTTCACTCTA | 36 | 968 |
| 1315977 | N/A | N/A | 79673 | 79692 | GCTCTGCTACTTACTCACTC | 89 | 969 |
| 1315983 | N/A | N/A | 125507 | 125526 | GCATTCCTCCTCTCTCACTG | 60 | 970 |
| 1316020 | N/A | N/A | 40095 | 40114 | GCCACAGGACTCCCTGACAA | 78 | 971 |
| 1316034 | N/A | N/A | 10436 | 10455 | CCACATTCACCTCCCTCTCT | 64 | 972 |
| 1316035 | N/A | N/A | 100944 | 100963 | ACTCAGATATACTCCTGCTC | 54 | 973 |
| 1316094 | N/A | N/A | 115960 | 115979 | CCACCATTCATTTCTAGAAT | 59 | 974 |
| 1316095 | N/A | N/A | 5890 | 5909 | TGGACCTTACTTCTTACTAC | 44 | 975 |
| 1316114 | N/A | N/A | 69334 | 69353 | CTGAGATTCTTTTCACAGAA | 66 | 976 |
| 1316190 | N/A | N/A | 41800 | 41819 | TTTATTTATTTCAAAGGTCT | 48 | 977 |
| 1316195 | N/A | N/A | 17064 | 17083 | AACAAGTTCAAAAATACCTC | 72 | 978 |
| 1316207 | N/A | N/A | 23051 | 23070 | TTGAAATCTTTCTTTCCTAA | 81 | 979 |
| 1316234 | N/A | N/A | 68685 | 68704 | TGTCAATTTCTATCCCCCAT | 29 | 980 |
| 1316381 | N/A | N/A | 12553 | 12572 | TGTATTTCACCAATACTCAA | 86 | 981 |
| 1316387 | N/A | N/A | 17818 | 17837 | TCAATACTTTCCCCAAGTTC | 64 | 982 |
| 1316442 | N/A | N/A | 83711 | 83730 | ACTGTAATCAATCTTAGCTG | 64 | 983 |
| 1316457 | N/A | N/A | 136515 | 136534 | TGGATTTCAAAACAACACCT | 93 | 984 |
| 1316466 | N/A | N/A | 105619 | 105638 | AGGAAACCAAACACCTATGC | 71 | 985 |
| 1316469 | N/A | N/A | 108151 | 108170 | GATCATTTCTAAACAGACAT | 47 | 986 |
| 1316476 | N/A | N/A | 3104 | 3123 | GCAAAGGAAATTTCTTGATA | 70 | 987 |
| 1316547 | N/A | N/A | 75380 | 75399 | GCCAGGAACATCAATTCTGA | 62 | 988 |
| 1316553 | N/A | N/A | 22518 | 22537 | TGCTTCATGTATTTTAGCTC | 78 | 989 |
| 1316583 | N/A | N/A | 43575 | 43594 | ACACCCTTTTTACTCAACAA | 71 | 990 |
| 1316626 | N/A | N/A | 160797 | 160816 | CCAACACACCAGCACAGGCA | 72 | 991 |
| 1316650 | N/A | N/A | 47422 | 47441 | ACAAAGTTTATACCTTAACT | 83 | 992 |
| 1316679 | N/A | N/A | 53292 | 53311 | GTTCAAGTTCTTAACCGACT | 32 | 993 |
| 1316681 | N/A | N/A | 72495 | 72514 | AAGCATTGAACTCCAACCAC | 69 | 994 |
| 1316687 | N/A | N/A | 132283 | 132302 | GTTGAATCCAAAATATGAAT | 90 | 995 |
| 1316707 | N/A | N/A | 111408 | 111427 | CTTCAAGTAAAACCTTTTCC | 73 | 996 |
| 1316726 | N/A | N/A | 45565 | 45584 | ACTAATTGCCTTTTTCTCCC | 83 | 997 |
| 1316738 | N/A | N/A | 149488 | 149507 | CCATTTTTCAAATCAAGGAC | 78 | 998 |
| 1316799 | N/A | N/A | 104192 | 104211 | GGAACACTTTCCTTCTGCAC | 80 | 999 |
| 1316856 | N/A | N/A | 98517 | 98536 | CTTCCATTTAAATTGTGTAA | 67 | 1000 |
| 1316873 | N/A | N/A | 127356 | 127375 | CCTTTGGTTTATTTCTTTTA | 57 | 1001 |
| 1316950 | N/A | N/A | 110053 | 110072 | TTCGATCTCCACTCTACTCA | 77 | 1002 |
| 1316956 | N/A | N/A | 134612 | 134631 | CACAAGATATTTATAATCTT | 80 | 1003 |
| 1316998 | 7419 | 7438 | 146511 | 146530 | GCCAAAATCCCCTCCCGGTT | 53 | 1004 |
| 1317021 | N/A | N/A | 33727 | 33746 | CTGAGGCAACAATCATACCT | 85 | 1005 |
| 1317056 | N/A | N/A | 56713 | 56732 | TCACCTTGTTTTCTTGATCA | 81 | 1006 |
| 1317108 | N/A | N/A | 118110 | 118129 | AGACATCACCCATTAACTCT | 54 | 1007 |
| 1317124 | N/A | N/A | 117789 | 117808 | CAGTCATACATTGATTTCAA | 33 | 1008 |
| 1317135 | N/A | N/A | 22161 | 22180 | ATCAAGCTCTTTCTTTCCTT | 60 | 1009 |
| 1317191 | N/A | N/A | 141855 | 141874 | CGAGCATTAATTTCTGAGAA | 44 | 1010 |
| 1317220 | N/A | N/A | 32324 | 32343 | ACCACATTCCCAGTGACTCA | 88 | 1011 |
| 1317231 | N/A | N/A | 51032 | 51051 | TACATGGAATTAACACAGCA | 51 | 1012 |

TABLE 15
Reduction of HTT RNA by 5-10-5 MOE gapmers with mixed PO/PS internucleoside
linkages in A431 cells

| | SEQ | SEQ | SEQ | SEQ | | | |
|---|---|---|---|---|---|---|---|
| | ID No: | ID No: | ID No: | ID No: | | HTT | SEQ |
| Compound | 1 Start | 1 Stop | 2 Start | 2 Stop | | (% | ID |
| Number | Site | Site | Site | Site | Sequence (5′ to 3′) | UTC) | NO |
| 388241 | 4862 | 4881 | 106917 | 106936 | CTCAGTAACATTGACACCAC | 29 | 858 |
| 1314519 | N/A | N/A | 130441 | 130460 | AAACTTACGACATAATCACA | 96 | 1013 |
| 1314577 | N/A | N/A | 108141 | 108160 | AAACAGACATATCCAGAGCT | 64 | 1014 |
| 1314599 | N/A | N/A | 17807 | 17826 | CCCAAGTTCAATTTACTTTC | 68 | 1015 |
| 1314623 | N/A | N/A | 106952 | 106971 | CATACATTCCTCTTACCTGA | 97 | 1016 |
| 1314738 | N/A | N/A | 55839 | 55858 | GGTTATCTCCTAAATTGCAA | 45 | 1017 |
| 1314807 | N/A | N/A | 62310 | 62329 | GCCTCACTTTCACCTTCTTG | 78 | 1018 |
| 1314842 | N/A | N/A | 43413 | 43432 | CAGCTGTTTATCAACACGCA | 90 | 1019 |
| 1314924 | N/A | N/A | 125053 | 125072 | CGGCAAATTTCTCCACAGCA | 39 | 1020 |
| 1314945 | N/A | N/A | 132174 | 132193 | TCATCTTGATTCATAATCCT | 64 | 1021 |
| 1315095 | N/A | N/A | 118109 | 118128 | GACATCACCCATTAACTCTA | 49 | 1022 |
| 1315123 | N/A | N/A | 39968 | 39987 | GACAAACTTTTTTAGCTGCA | 22 | 1023 |
| 1315175 | N/A | N/A | 14028 | 14047 | GAATTATTTATTCCAAGGGA | 50 | 1024 |
| 1315198 | N/A | N/A | 75376 | 75395 | GGAACATCAATTCTGAGCTT | 43 | 1025 |
| 1315199 | N/A | N/A | 45542 | 45561 | TTGTTGATAATATATGCATA | 91 | 1026 |
| 1315217 | N/A | N/A | 15442 | 15461 | TCACATGTACCATCTGATCC | 68 | 1027 |
| 1315221 | N/A | N/A | 44976 | 44995 | GCAATCCCAATTTAACACAG | 76 | 1028 |
| 1315330 | N/A | N/A | 3100 | 3119 | AGGAAATTTCTTGATACCCA | 36 | 1029 |
| 1315344 | N/A | N/A | 20041 | 20060 | CACTCCAATTTTCAAGGCCA | 85 | 1030 |
| 1315443 | N/A | N/A | 98479 | 98498 | AGGAAAGTTTTCAATTTCTT | 88 | 1031 |
| 1315477 | N/A | N/A | 22491 | 22510 | CGGTGCATAAACATTTCAGC | 64 | 1032 |
| 1315504 | N/A | N/A | 18303 | 18322 | TCTTAAATTTTCAATCCCCT | 64 | 1033 |
| 1315510 | N/A | N/A | 83710 | 83729 | CTGTAATCAATCTTAGCTGT | 77 | 1034 |
| 1315545 | N/A | N/A | 10404 | 10423 | GCCACCACTAACCTACTCTA | 83 | 1035 |
| 1315580 | N/A | N/A | 117436 | 117455 | AAGCAGTATTTACATTATGA | 56 | 1036 |
| 1315609 | N/A | N/A | 47419 | 47438 | AAGTTTATACCTTAACTTCT | 101 | 1037 |
| 1315654 | N/A | N/A | 32219 | 32238 | GCTTTTGTTTCTCAATCCGT | 54 | 1038 |
| 1315698 | N/A | N/A | 48875 | 48894 | GTATAACTTTTCATTAGCGA | 16 | 1039 |
| 1315743 | 12302 | 12321 | 169051 | 169070 | GTTTCATTAAAATCTTTCCC | 63 | 1040 |
| 1315764 | N/A | N/A | 149411 | 149430 | CCCTCATACATTTTACAGGC | 93 | 1041 |
| 1315806 | N/A | N/A | 59082 | 59101 | CAACAAACATCATCATCTAA | 98 | 1042 |
| 1315818 | N/A | N/A | 160724 | 160743 | CACTGCACCAACATATGTGC | 98 | 1043 |
| 1315819 | N/A | N/A | 41762 | 41781 | AGACTCTTCCACTCATATGC | 93 | 1044 |
| 1315826 | N/A | N/A | 72494 | 72513 | AGCATTGAACTCCAACCACC | 70 | 1045 |
| 1315832 | N/A | N/A | 79671 | 79690 | TCTGCTACTTACTCACTCCC | 89 | 1046 |
| 1315862 | N/A | N/A | 23033 | 23052 | AAAACAGGCATTTAATGCTA | 92 | 1047 |
| 1315920 | N/A | N/A | 138734 | 138753 | AGTGGCACATCTACACATCC | 87 | 1048 |
| 1315942 | N/A | N/A | 22156 | 22175 | GCTCTTTCTTTCCTTTATTT | 70 | 1049 |
| 1315962 | N/A | N/A | 65571 | 65590 | GCAATAGTTGCAATGAGCCA | 67 | 1050 |
| 1315978 | N/A | N/A | 110048 | 110067 | TCTCCACTCTACTCAGATTA | 85 | 1051 |
| 1316000 | N/A | N/A | 9726 | 9745 | GCAATCCTCCAGCCTCCTCA | 62 | 1052 |
| 1316024 | 2075 | 2094 | 56666 | 56685 | ACAAATTTATCAACACTGCT | 62 | 1053 |
| 1316064 | N/A | N/A | 68649 | 68668 | CTCTAATTCCTTTAGAACAC | 68 | 1054 |
| 1316080 | N/A | N/A | 19454 | 19473 | GGTCATTTCCGCACAAGCAA | 34 | 1055 |
| 1316096 | N/A | N/A | 7316 | 7335 | GGAGAACTCACATTTCATGA | 31 | 1056 |
| 1316112 | N/A | N/A | 69329 | 69348 | ATTCTTTTCACAGAAGCACA | 64 | 1057 |
| 1316212 | N/A | N/A | 134511 | 134530 | GTGACAACTTCATAATGCAA | 50 | 1058 |
| 1316226 | N/A | N/A | 52743 | 52762 | TACAACCAAAACCACCCTCA | 97 | 1059 |
| 1316246 | N/A | N/A | 53287 | 53306 | AGTTCTTAACCGACTACTCC | 77 | 1060 |
| 1316248 | N/A | N/A | 141854 | 141873 | GAGCATTAATTTCTGAGAAC | 36 | 1061 |
| 1316263 | N/A | N/A | 114261 | 114280 | CCAGGTATTATTCCAGACTT | 41 | 1062 |
| 1316312 | N/A | N/A | 80876 | 80895 | TGTACATCAGTCATTAGTTT | 16 | 1063 |
| 1316327 | N/A | N/A | 46663 | 46682 | TTCCCTTTAATTACAGTTGC | 71 | 1064 |
| 1316356 | N/A | N/A | 119107 | 119126 | GCTATCTTTTACTCTAAGAT | 47 | 1065 |
| 1316383 | 6512 | 6531 | 136200 | 136219 | GGAATCCGATTCACCAGCTC | 63 | 1066 |
| 1316390 | N/A | N/A | 105259 | 105278 | CACTAGCTCCTTCCACAGGC | 77 | 1067 |
| 1316425 | N/A | N/A | 33726 | 33745 | TGAGGCAACAATCATACCTT | 100 | 1068 |
| 1316500 | N/A | N/A | 70457 | 70476 | ATCTTGGTGATTATCTGCCA | 31 | 1069 |
| 1316531 | N/A | N/A | 12544 | 12563 | CCAATACTCAATCAATTTCA | 53 | 1070 |
| 1316562 | N/A | N/A | 35411 | 35430 | TCTTTGTTTATAATCCTGTT | 65 | 1071 |
| 1316566 | N/A | N/A | 51031 | 51050 | ACATGGAATTAACACAGCAA | 39 | 1072 |
| 1316598 | N/A | N/A | 24886 | 24905 | CATCATGCTCCAACTGTCTA | 95 | 1073 |
| 1316649 | N/A | N/A | 129796 | 129815 | CACAGGTTATTTCACTCTAC | 40 | 1074 |
| 1316653 | N/A | N/A | 5889 | 5908 | GGACCTTACTTCTTACTACA | 40 | 1075 |
| 1316682 | N/A | N/A | 100927 | 100946 | CTCAAACCAATTTCACATTC | 80 | 1076 |
| 1316848 | N/A | N/A | 111402 | 111421 | GTAAAACCTTTTCCCAAGTC | 77 | 1077 |
| 1316853 | N/A | N/A | 94516 | 94535 | TAGTTTGTATATCTCAAGCC | 89 | 1078 |
| 1316944 | N/A | N/A | 115953 | 115972 | TCATTTCTAGAATAACTCTC | 80 | 1079 |
| 1316987 | N/A | N/A | 17063 | 17082 | ACAAGTTCAAAAATACCTCT | 83 | 1080 |
| 1316992 | N/A | N/A | 34507 | 34526 | GTAGCAGCTAACATCTAAGC | 77 | 1081 |
| 1317053 | N/A | N/A | 60418 | 60437 | CAGCAACTTCACAAACATTG | 94 | 1082 |
| 1317083 | N/A | N/A | 81283 | 81302 | TGGATGGGAATTCAATAAAC | 61 | 1083 |
| 1317088 | N/A | N/A | 127355 | 127374 | CTTTGGTTTATTTCTTTTAA | 71 | 1084 |
| 1317120 | N/A | N/A | 73081 | 73100 | CTGGAAGCAGACATTTGCAA | 94 | 1085 |
| 1317193 | N/A | N/A | 133708 | 133727 | ACAAATCTATATCCTTTATA | 91 | 1086 |
| 1317212 | N/A | N/A | 104191 | 104210 | GAACACTTTCCTTCTGCACT | 79 | 1087 |
| 1317226 | N/A | N/A | 26582 | 26601 | ACTTCTTACCACTTTGAGGA | 93 | 1088 |
| 1317234 | N/A | N/A | 145879 | 145898 | CCCACAGCCCATCTGCACAA | 93 | 1089 |

TABLE 16
Reduction of HTT RNA by 5-10-5 MOE gapmers with mixed PO/PS internucleoside
linkages in A431 cells

| | SEQ | SEQ | SEQ | SEQ | | | |
|---|---|---|---|---|---|---|---|
| | ID No: | ID No: | ID No: | ID No: | | HTT | SEQ |
| Compound | 1 Start | 1 Stop | 2 Start | 2 Stop | | (% | ID |
| Number | Site | Site | Site | Site | Sequence (5′ to 3′) | UTC) | NO |
| 388241 | 4862 | 4881 | 106917 | 106936 | CTCAGTAACATTGACACCAC | 29 | 858 |
| 1314488 | N/A | N/A | 73065 | 73084 | GCAAAGTCAAATTATAGACA | 92 | 1090 |
| 1314547 | N/A | N/A | 22153 | 22172 | CTTTCTTTCCTTTATTTGCC | 64 | 1091 |
| 1314566 | N/A | N/A | 127345 | 127364 | TTTCTTTTAAACACTCATCA | 63 | 1092 |
| 1314617 | N/A | N/A | 138731 | 138750 | GGCACATCTACACATCCGTC | 62 | 1093 |
| 1314660 | N/A | N/A | 56541 | 56560 | ACAATTATACATTTATGCTA | 72 | 1094 |
| 1314730 | N/A | N/A | 46661 | 46680 | CCCTTTAATTACAGTTGCCA | 69 | 1095 |
| 1314794 | N/A | N/A | 125052 | 125071 | GGCAAATTTCTCCACAGCAT | 44 | 1096 |
| 1314804 | N/A | N/A | 26552 | 26571 | GCAATTAGTCCTCACACATA | 91 | 1097 |
| 1314817 | N/A | N/A | 117434 | 117453 | GCAGTATTTACATTATGACT | 50 | 1098 |
| 1315014 | N/A | N/A | 80867 | 80886 | GTCATTAGTTTCTAATATCT | 28 | 1099 |
| 1315029 | N/A | N/A | 134371 | 134390 | ACAAGGTACTCTAAAGACTG | 53 | 1100 |
| | | | 134404 | 134423 | | | |
| 1315116 | N/A | N/A | 160723 | 160742 | ACTGCACCAACATATGTGCC | 106 | 1101 |
| 1315135 | N/A | N/A | 149410 | 149429 | CCTCATACATTTTACAGGCC | 81 | 1102 |
| 1315137 | N/A | N/A | 39967 | 39986 | ACAAACTTTTTTAGCTGCAA | 27 | 1103 |
| 1315153 | N/A | N/A | 108139 | 108158 | ACAGACATATCCAGAGCTCA | 58 | 1104 |
| 1315159 | 4850 | 4869 | 106905 | 106924 | GACACCACCACCTCTTTTTG | 41 | 1105 |
| 1315185 | N/A | N/A | 20022 | 20041 | AGCACCTTCAAATCTTTCTG | 54 | 1106 |
| 1315244 | N/A | N/A | 141372 | 141391 | AGAAGAATTTCTACACACTT | 104 | 1107 |
| 1315391 | N/A | N/A | 45527 | 45546 | GCATATGCCTTCCCTCTGCC | 86 | 1108 |
| 1315454 | N/A | N/A | 17061 | 17080 | AAGTTCAAAAATACCTCTAC | 88 | 1109 |
| 1315518 | N/A | N/A | 98478 | 98497 | GGAAAGTTTTCAATTTCTTA | 70 | 1110 |
| 1315523 | N/A | N/A | 24836 | 24855 | GCCATGTACATGAAACTGAC | 90 | 1111 |
| 1315533 | N/A | N/A | 130439 | 130458 | ACTTACGACATAATCACAGA | 92 | 1112 |
| 1315538 | N/A | N/A | 23029 | 23048 | CAGGCATTTAATGCTAGAAA | 85 | 1113 |
| 1315566 | N/A | N/A | 55796 | 55815 | GTATGGTATTTCATATGTTT | 31 | 1114 |
| 1315588 | N/A | N/A | 132173 | 132192 | CATCTTGATTCATAATCCTA | 74 | 1115 |
| 1315679 | N/A | N/A | 105211 | 105230 | GGGTTCCTTATTTAAGCTCC | 87 | 1116 |
| 1315689 | N/A | N/A | 52733 | 52752 | ACCACCCTCATATAATCCAG | 59 | 1117 |
| 1315713 | N/A | N/A | 135638 | 135657 | CCAAGGCTCTACCAAGGCTC | 86 | 1118 |
| | | | 135649 | 135668 | | | |
| 1315745 | N/A | N/A | 53280 | 53299 | AACCGACTACTCCAAGCCTT | 76 | 1119 |
| 1315824 | 5164 | 5183 | 113978 | 113997 | CCAGAATTCCCGATATCCAC | 39 | 1120 |
| 1315840 | N/A | N/A | 70365 | 70384 | TTCTGCCTTTTTTCACTCAA | 56 | 1121 |
| 1315846 | N/A | N/A | 9588 | 9607 | GCAATCCTCCCACCACACCG | 68 | 1122 |
| 1315882 | N/A | N/A | 133704 | 133723 | ATCTATATCCTTTATATCCT | 86 | 1123 |
| 1315918 | N/A | N/A | 12510 | 12529 | GTTAACATCACTAAAGCCAA | 63 | 1124 |
| 1315941 | N/A | N/A | 109996 | 110015 | GCACCATTCTAAAACCATCT | 68 | 1125 |
| 1315943 | N/A | N/A | 44972 | 44991 | TCCCAATTTAACACAGTTTC | 98 | 1126 |
| 1316054 | 11875 | 11894 | 168624 | 168643 | GGTGAAGTCATTTTTACTAA | 57 | 1127 |
| 1316079 | N/A | N/A | 15363 | 15382 | GTTACAGCTTATCTAAAGTC | 67 | 1128 |
| 1316102 | N/A | N/A | 100926 | 100945 | TCAAACCAATTTCACATTCA | 89 | 1129 |
| 1316111 | N/A | N/A | 35389 | 35408 | TACTACTGAATTTCATTGAT | 66 | 1130 |
| 1316151 | N/A | N/A | 60414 | 60433 | AACTTCACAAACATTGATCA | 100 | 1131 |
| 1316173 | N/A | N/A | 94345 | 94364 | GCTTCTACCCTACATATCCC | 84 | 1132 |
| 1316220 | N/A | N/A | 32218 | 32237 | CTTTTGTTTCTCAATCCGTT | 67 | 1133 |
| 1316237 | N/A | N/A | 111363 | 111382 | AACACATTCCCATTAGGGTT | 102 | 1134 |
| 1316238 | N/A | N/A | 81279 | 81298 | TGGGAATTCAATAAACTGCA | 37 | 1135 |
| 1316273 | N/A | N/A | 83587 | 83606 | TCAAAGGGCTTATACATCCT | 78 | 1136 |
| 1316289 | N/A | N/A | 19345 | 19364 | GGTATTCTTCCATATGGGCT | 44 | 1137 |
| 1316294 | N/A | N/A | 3092 | 3111 | TCTTGATACCCATATTTTGA | 50 | 1138 |
| 1316304 | N/A | N/A | 72425 | 72444 | GAACTCATAAATATCAACCC | 70 | 1139 |
| 1316309 | N/A | N/A | 104179 | 104198 | TCTGCACTAAATTTTCCTAA | 79 | 1140 |
| 1316350 | N/A | N/A | 18302 | 18321 | CTTAAATTTTCAATCCCCTT | 77 | 1141 |
| 1316363 | N/A | N/A | 68579 | 68598 | CAGTGGTTTGAATAAAGCCA | 84 | 1142 |
| 1316444 | N/A | N/A | 65481 | 65500 | GAAGTTGCTATCATTTGCAG | 56 | 1143 |
| 1316451 | N/A | N/A | 69321 | 69340 | CACAGAAGCACAATTTCTTA | 75 | 1144 |
| 1316463 | N/A | N/A | 34506 | 34525 | TAGCAGCTAACATCTAAGCC | 85 | 1145 |
| 1316480 | N/A | N/A | 119106 | 119125 | CTATCTTTTACTCTAAGATA | 111 | 1146 |
| 1316498 | N/A | N/A | 13999 | 14018 | AAGGCAACTATTTCACGCAT | 64 | 1147 |
| 1316511 | N/A | N/A | 22489 | 22508 | GTGCATAAACATTTCAGCTT | 87 | 1148 |
| 1316512 | N/A | N/A | 33725 | 33744 | GAGGCAACAATCATACCTTA | 103 | 1149 |
| 1316556 | N/A | N/A | 115930 | 115949 | ATCTTGTAAAAATAACTCCC | 93 | 1150 |
| 1316560 | N/A | N/A | 47418 | 47437 | AGTTTATACCTTAACTTCTC | 92 | 1151 |
| 1316589 | N/A | N/A | 6824 | 6843 | GGAGAGTTTTTACAAATCAT | 27 | 1152 |
| 1316594 | N/A | N/A | 79607 | 79626 | CCCAAATTTATACACTGAAA | 83 | 1153 |
| 1316616 | N/A | N/A | 51029 | 51048 | ATGGAATTAACACAGCAACT | 33 | 1154 |
| 1316620 | N/A | N/A | 129793 | 129812 | AGGTTATTTCACTCTACACT | 31 | 1155 |
| 1316665 | N/A | N/A | 10402 | 10421 | CACCACTAACCTACTCTACT | 67 | 1156 |
| 1316676 | N/A | N/A | 17804 | 17823 | AAGTTCAATTTACTTTCAAT | 84 | 1157 |
| 1316705 | N/A | N/A | 75326 | 75345 | AGCTAGGTATTTCCCTCTTA | 46 | 1158 |
| 1316723 | N/A | N/A | 145835 | 145854 | GACCAGCTAATCTCTTACCT | 57 | 1159 |
| 1316731 | N/A | N/A | 59077 | 59096 | AACATCATCATCTAAACTTA | 93 | 1160 |
| 1316852 | N/A | N/A | 118108 | 118127 | ACATCACCCATTAACTCTAC | 67 | 1161 |
| 1316913 | N/A | N/A | 61811 | 61830 | CCAGATTTATAAACATTCTA | 87 | 1162 |
| 1317020 | N/A | N/A | 43354 | 43373 | AGCATTTTACAAACACTACC | 85 | 1163 |
| 1317072 | N/A | N/A | 41742 | 41761 | CTCCACCTTACCTAAGAGCA | 108 | 1164 |
| 1317143 | N/A | N/A | 5888 | 5907 | GACCTTACTTCTTACTACAA | 76 | 1165 |
| 1317178 | N/A | N/A | 48854 | 48873 | GGGTATTTCCACTCATTATT | 33 | 1166 |

TABLE 17
Reduction of HTT RNA by 5-10-5 MOE gapmers with mixed PO/PS internucleoside
linkages in A431 cells

| | SEQ | SEQ | SEQ | SEQ | | | |
|---|---|---|---|---|---|---|---|
| | ID No: | ID No: | ID No: | ID No: | | HTT | SEQ |
| Compound | 1 Start | 1 Stop | 2 Start | 2 Stop | | (% | ID |
| Number | Site | Site | Site | Site | Sequence (5′ to 3′) | UTC) | NO |
| 388241 | 4862 | 4881 | 106917 | 106936 | CTCAGTAACATTGACACCAC | 27 | 858 |
| 1314521 | N/A | N/A | 22150 | 22169 | TCTTTCCTTTATTTGCCTCT | 47 | 1167 |
| 1314537 | N/A | N/A | 23018 | 23037 | TGCTAGAAATTTCCATTTAC | 69 | 1168 |
| 1314571 | N/A | N/A | 117433 | 117452 | CAGTATTTACATTATGACTA | 62 | 1169 |
| 1314628 | N/A | N/A | 141361 | 141380 | TACACACTTCCATCAGTGCT | 97 | 1170 |
| 1314757 | N/A | N/A | 129792 | 129811 | GGTTATTTCACTCTACACTG | 36 | 1171 |
| 1314789 | N/A | N/A | 65447 | 65466 | GCAAAATCTCTGAATAGGCA | 18 | 1172 |
| 1314798 | N/A | N/A | 13996 | 14015 | GCAACTATTTCACGCATGCC | 66 | 1173 |
| 1314848 | N/A | N/A | 134292 | 134311 | GCATGATAATTATATTCTCC | 25 | 1174 |
| 1314865 | N/A | N/A | 39369 | 39388 | AGTGCCACTTTTCAACACAT | 103 | 1175 |
| 1314946 | N/A | N/A | 69318 | 69337 | AGAAGCACAATTTCTTAGCA | 70 | 1176 |
| 1314950 | N/A | N/A | 104176 | 104195 | GCACTAAATTTTCCTAATTA | 88 | 1177 |
| 1314961 | N/A | N/A | 73051 | 73070 | TAGACAATTTTTAAGCAAAC | 91 | 1178 |
| 1315072 | N/A | N/A | 19344 | 19363 | GTATTCTTCCATATGGGCTC | 56 | 1179 |
| 1315099 | N/A | N/A | 127335 | 127354 | ACACTCATCATCTAAGCATT | 67 | 1180 |
| 1315143 | N/A | N/A | 50850 | 50869 | GGGTAATTTCCTCAAAGGCA | 10 | 1181 |
| 1315207 | 5039 | 5058 | 112922 | 112941 | GTATTTAACACTCCAAGGGC | 29 | 1182 |
| 1315253 | N/A | N/A | 135640 | 135659 | TACCAAGGCTCTACCAAGGC | 64 | 1183 |
| | | | 135651 | 135670 | | | |
| 1315294 | N/A | N/A | 56481 | 56500 | TGATTATTCCTCAATTGGTC | 18 | 1184 |
| 1315295 | N/A | N/A | 74501 | 74520 | GGACATTACCTTTATTGCGG | 81 | 1185 |
| 1315307 | N/A | N/A | 109993 | 110012 | CCATTCTAAAACCATCTGTA | 77 | 1186 |
| 1315311 | 11870 | 11889 | 168619 | 168638 | AGTCATTTTTACTAATGAGC | 50 | 1187 |
| 1315368 | N/A | N/A | 72423 | 72442 | ACTCATAAATATCAACCCCT | 96 | 1188 |
| 1315386 | N/A | N/A | 79596 | 79615 | ACACTGAAACTTAATTACCA | 80 | 1189 |
| 1315449 | N/A | N/A | 80866 | 80885 | TCATTAGTTTCTAATATCTT | 76 | 1190 |
| 1315457 | N/A | N/A | 43329 | 43348 | CAGTGCTTAAATTATTAGCA | 63 | 1191 |
| 1315468 | N/A | N/A | 17759 | 17778 | TTGAACTATATTCCACTCAA | 77 | 1192 |
| 1315547 | N/A | N/A | 55763 | 55782 | GGGCATGATTCCACATCACA | 77 | 1193 |
| 1315560 | N/A | N/A | 22485 | 22504 | ATAAACATTTCAGCTTGCTA | 99 | 1194 |
| 1315645 | N/A | N/A | 145833 | 145852 | CCAGCTAATCTCTTACCTCA | 72 | 1195 |
| 1315720 | N/A | N/A | 130438 | 130457 | CTTACGACATAATCACAGAA | 98 | 1196 |
| 1315731 | N/A | N/A | 70353 | 70372 | TCACTCAATATTACAATCCA | 75 | 1197 |
| 1315752 | N/A | N/A | 48853 | 48872 | GGTATTTCCACTCATTATTT | 25 | 1198 |
| 1315759 | N/A | N/A | 59076 | 59095 | ACATCATCATCTAAACTTAA | 80 | 1199 |
| 1315761 | N/A | N/A | 133703 | 133722 | TCTATATCCTTTATATCCTG | 62 | 1200 |
| 1315780 | N/A | N/A | 46628 | 46647 | GCACTCAAATTTAAACTGTA | 78 | 1201 |
| 1315953 | N/A | N/A | 45506 | 45525 | AGCTTCTTAAACATACTATT | 87 | 1202 |
| 1315970 | N/A | N/A | 68426 | 68445 | TCATTGTATCTATCACGCAA | 38 | 1203 |
| 1316018 | N/A | N/A | 105194 | 105213 | TCCAGCAAAATCATCAGGCA | 69 | 1204 |
| 1316025 | N/A | N/A | 15323 | 15342 | AGAGATAGAATTCAAACCTT | 57 | 1205 |
| 1316048 | N/A | N/A | 3056 | 3075 | GTTCTGTCAAATCAGCATAA | 66 | 1206 |
| 1316110 | N/A | N/A | 115715 | 115734 | TCCACTGTAAATATACACCA | 57 | 1207 |
| 1316218 | N/A | N/A | 35333 | 35352 | GCATCTTGTTTTACCACCCA | 28 | 1208 |
| 1316299 | N/A | N/A | 20021 | 20040 | GCACCTTCAAATCTTTCTGT | 68 | 1209 |
| 1316314 | N/A | N/A | 12495 | 12514 | GCCAAACTGCATCTTACAAC | 39 | 1210 |
| 1316354 | N/A | N/A | 32156 | 32175 | ACAACCATATTTTTAACTCA | 84 | 1211 |
| 1316366 | N/A | N/A | 6821 | 6840 | GAGTTTTTACAAATCATCTA | 77 | 1212 |
| 1316398 | N/A | N/A | 53256 | 53275 | GGAGCAATATATAAAGACAT | 93 | 1213 |
| 1316403 | N/A | N/A | 52732 | 52751 | CCACCCTCATATAATCCAGT | 75 | 1214 |
| 1316422 | N/A | N/A | 9019 | 9038 | AACACAGGTCTTCCTCCCAA | 55 | 1215 |
| 1316428 | N/A | N/A | 83581 | 83600 | GGCTTATACATCCTACAAAT | 60 | 1216 |
| 1316578 | N/A | N/A | 26541 | 26560 | TCACACATACACAATTTAAT | 98 | 1217 |
| 1316581 | N/A | N/A | 160500 | 160519 | CAGCATGTCCCAAATCCTGC | 81 | 1218 |
| 1316586 | N/A | N/A | 118105 | 118124 | TCACCCATTAACTCTACCGT | 66 | 1219 |
| 1316600 | N/A | N/A | 10393 | 10412 | CCTACTCTACTACCCCATCT | 128 | 1220 |
| 1316632 | N/A | N/A | 18259 | 18278 | TTTTTAATTTTCTAATGGGA | 92 | 1221 |
| 1316659 | N/A | N/A | 61440 | 61459 | GCTACATTTTTTTAAAAGTT | 85 | 1222 |
| 1316678 | N/A | N/A | 24772 | 24791 | CTTGAAGTAATCCCAAGAAT | 109 | 1223 |
| 1316697 | N/A | N/A | 125051 | 125070 | GCAAATTTCTCCACAGCATC | 76 | 1224 |
| 1316702 | N/A | N/A | 47417 | 47436 | GTTTATACCTTAACTTCTCC | 86 | 1225 |
| 1316711 | N/A | N/A | 94182 | 94201 | GGTGAGTAAATCTACCTTTA | 101 | 1226 |
| 1316748 | N/A | N/A | 111323 | 111342 | AAAGCACTCATCAGTGCCCT | 100 | 1227 |
| 1316765 | N/A | N/A | 5886 | 5905 | CCTTACTTCTTACTACAAAT | 84 | 1228 |
| 1316832 | N/A | N/A | 17059 | 17078 | GTTCAAAAATACCTCTACTA | 76 | 1229 |
| 1316843 | N/A | N/A | 81259 | 81278 | GTCACACCTAAATCCTAGCC | 46 | 1230 |
| 1316954 | N/A | N/A | 119046 | 119065 | GCTTTGATCACAAAAGCACC | 95 | 1231 |
| 1316972 | 4826 | 4845 | 106881 | 106900 | TCAAGCTCTTTTCCTGCATC | 26 | 1232 |
| 1316977 | N/A | N/A | 138729 | 138748 | CACATCTACACATCCGTCCA | 80 | 1233 |
| 1316986 | N/A | N/A | 44949 | 44968 | CTGTTCACAAATGTTAGAAA | 51 | 1234 |
| 1317018 | 1019 | 1038 | 41729 | 41748 | AAGAGCACATTTAGTAGCCA | 60 | 1235 |
| 1317042 | N/A | N/A | 98440 | 98459 | AAGTCTTGAAATCCAAGTTA | 77 | 1236 |
| 1317110 | N/A | N/A | 131678 | 131697 | GGATAACACCTCTTTCAGTT | 46 | 1237 |
| 1317122 | N/A | N/A | 33722 | 33741 | GCAACAATCATACCTTAATT | 88 | 1238 |
| 1317146 | N/A | N/A | 100923 | 100942 | AACCAATTTCACATTCACAC | 76 | 1239 |
| 1317153 | N/A | N/A | 108109 | 108128 | GGCTGATGAACTCCTCTCCA | 34 | 1240 |
| 1317189 | N/A | N/A | 60362 | 60381 | CCACTTCTAAATAAATCTCA | 95 | 1241 |
| 1317201 | N/A | N/A | 34505 | 34524 | AGCAGCTAACATCTAAGCCC | 83 | 1242 |
| 1317208 | N/A | N/A | 149408 | 149427 | TCATACATTTTACAGGCCTT | 86 | 1243 |

TABLE 18
Reduction of HTT RNA by 5-10-5 MOE gapmers with mixed PO/PS internucleoside
linkages in A431 cells

| | SEQ | SEQ | SEQ | SEQ | | | |
|---|---|---|---|---|---|---|---|
| | ID No: | ID No: | ID No: | ID No: | | HTT | SEQ |
| Compound | 1 Start | 1 Stop | 2 Start | 2 Stop | | (% | ID |
| Number | Site | Site | Site | Site | Sequence (5′ to 3′) | UTC) | NO |
| 388241 | 4862 | 4881 | 106917 | 106936 | CTCAGTAACATTGACACCAC | 25 | 858 |
| 1314572 | N/A | N/A | 109959 | 109978 | GACCACACTAAAACTGCTGT | 89 | 1244 |
| 1314592 | N/A | N/A | 35332 | 35351 | CATCTTGTTTTACCACCCAT | 67 | 1245 |
| 1314619 | N/A | N/A | 130436 | 130455 | TACGACATAATCACAGAAGA | 81 | 1246 |
| 1314648 | N/A | N/A | 69317 | 69336 | GAAGCACAATTTCTTAGCAA | 41 | 1247 |
| 1314651 | N/A | N/A | 45496 | 45515 | ACATACTATTTATTCAAGAA | 88 | 1248 |
| 1314696 | 4825 | 4844 | 106880 | 106899 | CAAGCTCTTTTCCTGCATCA | 25 | 1249 |
| 1314706 | N/A | N/A | 138628 | 138647 | GACCATGTCAATGAATGGCA | 96 | 1250 |
| 1314753 | N/A | N/A | 98429 | 98448 | TCCAAGTTATATACATTACA | 68 | 1251 |
| 1314776 | N/A | N/A | 79592 | 79611 | TGAAACTTAATTACCAGGGT | 72 | 1252 |
| 1314790 | N/A | N/A | 94124 | 94143 | ATCCAGTTATTCTTATGCCA | 35 | 1253 |
| 1314802 | N/A | N/A | 80862 | 80881 | TAGTTTCTAATATCTTGAAC | 84 | 1254 |
| 1314825 | N/A | N/A | 131471 | 131490 | ACAGGAGGTTTTATTTTCCT | 97 | 1255 |
| 1314846 | N/A | N/A | 2987 | 3006 | CAGAAAGGTCTTCCTTCCCA | 78 | 1256 |
| 1314881 | N/A | N/A | 15312 | 15331 | TCAAACCTTTTTTTTTCCTA | 75 | 1257 |
| 1314922 | N/A | N/A | 129017 | 129036 | GCCTATAGATTCTATTTCTA | 81 | 1258 |
| 1314930 | N/A | N/A | 52720 | 52739 | AATCCAGTTATTAGTACCTT | 27 | 1259 |
| 1315051 | N/A | N/A | 26537 | 26556 | ACATACACAATTTAATCCTC | 95 | 1260 |
| 1315113 | N/A | N/A | 53161 | 53180 | TGGTCAGAAACAACTGTCAA | 76 | 1261 |
| 1315174 | N/A | N/A | 17673 | 17692 | TCATTTTTTCACATTTAGGT | 26 | 1262 |
| 1315200 | N/A | N/A | 68258 | 68277 | GCAACAATTTATTCTAAGCT | 34 | 1263 |
| 1315319 | N/A | N/A | 117425 | 117444 | ACATTATGACTATCTGAATC | 70 | 1264 |
| 1315335 | N/A | N/A | 24752 | 24771 | AGCAAATCCCAGTAATACGG | 91 | 1265 |
| 1315361 | N/A | N/A | 22454 | 22473 | TGAACGAATCCCCTTCATCA | 77 | 1266 |
| 1315383 | N/A | N/A | 73038 | 73057 | AGCAAACAACAGTCTTCCTT | 94 | 1267 |
| 1315390 | N/A | N/A | 135639 | 135658 | ACCAAGGCTCTACCAAGGCT | 69 | 1268 |
| | | | 135650 | 135669 | | | |
| 1315430 | N/A | N/A | 13912 | 13931 | GCCTAAATATATTTACCATC | 84 | 1269 |
| 1315431 | N/A | N/A | 18236 | 18255 | AGGGCACTGCACCAATATCA | 89 | 1270 |
| 1315639 | N/A | N/A | 22145 | 22164 | CCTTTATTTGCCTCTTCCCC | 75 | 1271 |
| 1315640 | N/A | N/A | 108108 | 108127 | GCTGATGAACTCCTCTCCAT | 53 | 1272 |
| 1315669 | N/A | N/A | 141360 | 141379 | ACACACTTCCATCAGTGCTT | 114 | 1273 |
| 1315702 | N/A | N/A | 56467 | 56486 | TTGGTCATTTTCATCAGCTA | 16 | 1274 |
| 1315757 | N/A | N/A | 59073 | 59092 | TCATCATCTAAACTTAAACC | 105 | 1275 |
| 1315775 | N/A | N/A | 33719 | 33738 | ACAATCATACCTTAATTTCA | 100 | 1276 |
| 1315790 | N/A | N/A | 112870 | 112889 | GACACCACAAACATTTCTAC | 101 | 1277 |
| 1315874 | N/A | N/A | 70351 | 70370 | ACTCAATATTACAATCCAGA | 25 | 1278 |
| 1315880 | N/A | N/A | 125012 | 125031 | TCATGACTTCATTCTATCCT | 73 | 1279 |
| 1315899 | 11869 | 11888 | 168618 | 168637 | GTCATTTTTACTAATGAGCT | 68 | 1280 |
| 1315948 | N/A | N/A | 119021 | 119040 | CCCATCCCTTTTTAAGGCAA | 91 | 1281 |
| 1315955 | N/A | N/A | 149261 | 149280 | CTGCATTCCACAACTTCCCA | 81 | 1282 |
| 1315972 | N/A | N/A | 60292 | 60311 | CACTATGTACTCCACAGCAC | 80 | 1283 |
| 1315979 | N/A | N/A | 105152 | 105171 | GTCAAACTATATCTCCAATA | 52 | 1284 |
| 1316010 | N/A | N/A | 74279 | 74298 | GGCACAGACATTACCTCTCC | 93 | 1285 |
| 1316030 | N/A | N/A | 44880 | 44899 | TTCAGGACCCACCCTTGCTC | 90 | 1286 |
| 1316069 | N/A | N/A | 61169 | 61188 | ACGGCACACACCTATTCTCC | 74 | 1287 |
| 1316166 | N/A | N/A | 46562 | 46581 | TGGAATATACTTACACCATA | 93 | 1288 |
| 1316169 | N/A | N/A | 115658 | 115677 | AGTTGGTTCCACATTTTAGC | 24 | 1289 |
| 1316202 | N/A | N/A | 100921 | 100940 | CCAATTTCACATTCACACGA | 81 | 1290 |
| 1316208 | N/A | N/A | 12494 | 12513 | CCAAACTGCATCTTACAACC | 78 | 1291 |
| 1316269 | N/A | N/A | 47397 | 47416 | CCCTAAATATTTCCCTATCA | 101 | 1292 |
| 1316290 | N/A | N/A | 48829 | 48848 | GGCACGCATTCCATACAGAA | 48 | 1293 |
| 1316328 | N/A | N/A | 19321 | 19340 | CCACCTTGCATCTCTGCACT | 86 | 1294 |
| 1316353 | N/A | N/A | 127297 | 127316 | GGGACACAATTCCCAGATTC | 84 | 1295 |
| 1316375 | N/A | N/A | 17029 | 17048 | CAAGATTATTTTAAATTTCT | 92 | 1296 |
| 1316397 | N/A | N/A | 118104 | 118123 | CACCCATTAACTCTACCGTA | 70 | 1297 |
| 1316423 | N/A | N/A | 158914 | 158933 | TTGCTAATTTTCTTTGCTGA | 71 | 1298 |
| 1316426 | N/A | N/A | 20009 | 20028 | CTTTCTGTTCCATCTTCACA | 72 | 1299 |
| 1316450 | N/A | N/A | 145700 | 145719 | AGGGAACTCCTCAATGCCAG | 68 | 1300 |
| 1316468 | N/A | N/A | 133699 | 133718 | TATCCTTTATATCCTGGGTT | 76 | 1301 |
| 1316484 | N/A | N/A | 10390 | 10409 | ACTCTACTACCCCATCTCTA | 87 | 1302 |
| 1316522 | N/A | N/A | 72375 | 72394 | GGTGTCTACCCATATTTTCT | 63 | 1303 |
| 1316524 | N/A | N/A | 6819 | 6838 | GTTTTTACAAATCATCTATC | 80 | 1304 |
| 1316559 | N/A | N/A | 83580 | 83599 | GCTTATACATCCTACAAATC | 81 | 1305 |
| 1316605 | N/A | N/A | 34504 | 34523 | GCAGCTAACATCTAAGCCCT | 86 | 1306 |
| 1316645 | N/A | N/A | 111084 | 111103 | TGAGTGGACATCTCAGATGC | 90 | 1307 |
| 1316759 | N/A | N/A | 43326 | 43345 | TGCTTAAATTATTAGCATTA | 91 | 1308 |
| 1316862 | N/A | N/A | 55762 | 55781 | GGCATGATTCCACATCACAA | 52 | 1309 |
| 1316923 | N/A | N/A | 5882 | 5901 | ACTTCTTACTACAAATGTCC | 91 | 1310 |
| 1316940 | N/A | N/A | 50762 | 50781 | CCAACACAACTCTACCTTCA | 60 | 1311 |
| 1316993 | N/A | N/A | 22977 | 22996 | AAGTTTAGAAATCTATTGTT | 91 | 1312 |
| 1317045 | N/A | N/A | 41509 | 41528 | TTAGAAGTTTCCAATTCTTG | 88 | 1313 |
| 1317046 | N/A | N/A | 8997 | 9016 | GCTTGCATTGTTATTAGCAA | 81 | 1314 |
| 1317089 | N/A | N/A | 134291 | 134310 | CATGATAATTATATTCTCCT | 52 | 1315 |
| 1317105 | N/A | N/A | 103959 | 103978 | ACCACAAGATTTCATTCCAC | 70 | 1316 |
| 1317138 | N/A | N/A | 65432 | 65451 | AGGCAAGTCATATAAACCTA | 32 | 1317 |
| 1317157 | N/A | N/A | 39367 | 39386 | TGCCACTTTTCAACACATGC | 61 | 1318 |
| 1317168 | N/A | N/A | 81258 | 81277 | TCACACCTAAATCCTAGCCC | 85 | 1319 |
| 1317235 | N/A | N/A | 32081 | 32100 | TGGTACCTCAACCTTCAACA | 96 | 1320 |

TABLE 19
Reduction of HTT RNA by 5-10-5 MOE gapmers with mixed PO/PS internucleoside
linkages in A431 cells

| | SEQ | SEQ | SEQ | SEQ | | | |
|---|---|---|---|---|---|---|---|
| | ID No: | ID No: | ID No: | ID No: | | HTT | SEQ |
| Compound | 1 Start | 1 Stop | 2 Start | 2 Stop | | (% | ID |
| Number | Site | Site | Site | Site | Sequence (5′ to 3′) | UTC) | NO |
| 388241 | 4862 | 4881 | 106917 | 106936 | CTCAGTAACATTGACACCAC | 27 | 858 |
| 1314554 | N/A | N/A | 65324 | 65343 | ACTTTGGTTTTCTTTTCAGT | 36 | 1321 |
| 1314586 | N/A | N/A | 34471 | 34490 | TATGCTACACTCTAACACAT | 96 | 1322 |
| 1314631 | N/A | N/A | 117377 | 117396 | AAGGATGGCATCTCTTTCTA | 94 | 1323 |
| 1314646 | N/A | N/A | 22966 | 22985 | TCTATTGTTTTTATATCAGT | 89 | 1324 |
| 1314668 | N/A | N/A | 68257 | 68276 | CAACAATTTATTCTAAGCTT | 79 | 1325 |
| 1314684 | N/A | N/A | 6218 | 6237 | TAGCAGAGTTCAACAAGTGC | 67 | 1326 |
| 1314688 | N/A | N/A | 32057 | 32076 | GGCAAGTATCTTTTAAGCAA | 50 | 1327 |
| 1314764 | 4801 | 4820 | 106856 | 106875 | TATTTGTTCCTCTTAATACA | 78 | 1328 |
| 1314894 | N/A | N/A | 72302 | 72321 | GTATGTTTACTTGAACGGAT | 35 | 1329 |
| 1314936 | N/A | N/A | 39365 | 39384 | CCACTTTTCAACACATGCAC | 83 | 1330 |
| 1314999 | N/A | N/A | 56466 | 56485 | TGGTCATTTTCATCAGCTAT | 12 | 1331 |
| 1315010 | N/A | N/A | 73034 | 73053 | AACAACAGTCTTCCTTTCTC | 89 | 1332 |
| 1315166 | N/A | N/A | 52714 | 52733 | GTTATTAGTACCTTCAGTTA | 53 | 1333 |
| 1315169 | N/A | N/A | 12487 | 12506 | GCATCTTACAACCAGTGGTA | 36 | 1334 |
| 1315284 | N/A | N/A | 41474 | 41493 | TTGAGGCTTTTCCTACAGCT | 51 | 1335 |
| 1315291 | N/A | N/A | 103559 | 103578 | GCTTCTTTTCCTCCTGCTTA | 53 | 1336 |
| 1315355 | N/A | N/A | 47372 | 47391 | ACCAATGTGATCATTAGCTT | 60 | 1337 |
| 1315393 | N/A | N/A | 134977 | 134996 | GATTCTAGAAATATACACTC | 67 | 1338 |
| 1315395 | N/A | N/A | 17672 | 17691 | CATTTTTTCACATTTAGGTA | 81 | 1339 |
| 1315416 | N/A | N/A | 26536 | 26555 | CATACACAATTTAATCCTCA | 99 | 1340 |
| 1315452 | N/A | N/A | 83551 | 83570 | ACATCAACTATCCATTAGAC | 72 | 1341 |
| 1315528 | N/A | N/A | 131470 | 131489 | CAGGAGGTTTTATTTTCCTC | 96 | 1342 |
| 1315556 | 5816 | 5835 | 130399 | 130418 | CGTACTATTTCTCTATTGCA | 24 | 1343 |
| 1315559 | N/A | N/A | 43314 | 43333 | TAGCATTATCTTCAATTCAT | 47 | 1344 |
| 1315570 | N/A | N/A | 33718 | 33737 | CAATCATACCTTAATTTCAT | 106 | 1345 |
| 1315605 | 11868 | 11887 | 168617 | 168636 | TCATTTTTACTAATGAGCTC | 87 | 1346 |
| 1315608 | N/A | N/A | 18233 | 18252 | GCACTGCACCAATATCATTA | 81 | 1347 |
| 1315613 | N/A | N/A | 53123 | 53142 | GCTTGCCTTCTTCCAAGCCA | 95 | 1348 |
| 1315687 | N/A | N/A | 119020 | 119039 | CCATCCCTTTTTAAGGCAAC | 82 | 1349 |
| 1315706 | N/A | N/A | 100854 | 100873 | GCAGCATCGCCCTCTTCAGA | 90 | 1350 |
| 1315710 | N/A | N/A | 109957 | 109976 | CCACACTAAAACTGCTGTCA | 99 | 1351 |
| 1315719 | N/A | N/A | 19250 | 19269 | TCTCAGTTTTTCCTCTTGCC | 67 | 1352 |
| 1315750 | N/A | N/A | 22432 | 22451 | ATGAAATGACCATCTCATCC | 82 | 1353 |
| 1315756 | N/A | N/A | 69256 | 69275 | GTAAGATGACCATACAACTA | 72 | 1354 |
| 1315811 | N/A | N/A | 145667 | 145686 | GGAGGAATTTTACCTACAGC | 85 | 1355 |
| 1315837 | N/A | N/A | 149255 | 149274 | TCCACAACTTCCCATTCTGC | 70 | 1356 |
| 1315838 | N/A | N/A | 78919 | 78938 | GTATGAGCCCATCCACAGTA | 82 | 1357 |
| 1315875 | N/A | N/A | 60153 | 60172 | AGCATGCTTCCTTCTGCTCA | 95 | 1358 |
| 1315890 | N/A | N/A | 61167 | 61186 | GGCACACACCTATTCTCCTA | 73 | 1359 |
| 1315914 | N/A | N/A | 45493 | 45512 | TACTATTTATTCAAGAAGAA | 100 | 1360 |
| 1316028 | N/A | N/A | 5783 | 5802 | TGGAATACCACTACTTCATA | 77 | 1361 |
| 1316081 | N/A | N/A | 55682 | 55701 | CTACCAGCAAATTATTACCA | 63 | 1362 |
| 1316136 | N/A | N/A | 44826 | 44845 | TGTCTCACCCTTTCACTCCT | 96 | 1363 |
| 1316242 | N/A | N/A | 133683 | 133702 | GGTTGTCCTAACACAAGGAC | 82 | 1364 |
| 1316295 | N/A | N/A | 15309 | 15328 | AACCTTTTTTTTTCCTACTT | 91 | 1365 |
| 1316369 | N/A | N/A | 22138 | 22157 | TTGCCTCTTCCCCTATTTCT | 75 | 1366 |
| 1316371 | N/A | N/A | 112846 | 112865 | GCCAAAAGAAACGACAGCTT | 89 | 1367 |
| 1316388 | N/A | N/A | 50760 | 50779 | AACACAACTCTACCTTCATC | 79 | 1368 |
| 1316393 | N/A | N/A | 20005 | 20024 | CTGTTCCATCTTCACAGGGC | 68 | 1369 |
| 1316427 | N/A | N/A | 10379 | 10398 | CCATCTCTAACCCCAGGCAA | 86 | 1370 |
| 1316445 | N/A | N/A | 134289 | 134308 | TGATAATTATATTCTCCTTC | 63 | 1371 |
| 1316497 | N/A | N/A | 115610 | 115629 | GGCATGCAAATATCTTTTCA | 80 | 1372 |
| 1316509 | N/A | N/A | 125011 | 125030 | CATGACTTCATTCTATCCTC | 78 | 1373 |
| 1316530 | N/A | N/A | 118070 | 118089 | TAGCTCATTTATACTACCTC | 48 | 1374 |
| 1316535 | N/A | N/A | 158886 | 158905 | TGTGTGCTTTTACCATAACA | 29 | 1375 |
| 1316587 | N/A | N/A | 46550 | 46569 | ACACCATAAAATTACTCATA | 102 | 1376 |
| 1316603 | N/A | N/A | 98424 | 98443 | GTTATATACATTACAACCAT | 83 | 1377 |
| 1316701 | N/A | N/A | 128896 | 128915 | GACAGCACTCCTCTATATCT | 53 | 1378 |
| 1316725 | N/A | N/A | 108043 | 108062 | CAGTTGCTCATTTTCAGACC | 19 | 1379 |
| 1316732 | N/A | N/A | 17028 | 17047 | AAGATTATTTTAAATTTCTG | 108 | 1380 |
| 1316744 | N/A | N/A | 59072 | 59091 | CATCATCTAAACTTAAACCT | 99 | 1381 |
| 1316749 | N/A | N/A | 70341 | 70360 | ACAATCCAGATTATACATCT | 62 | 1382 |
| 1316750 | N/A | N/A | 141349 | 141368 | TCAGTGCTTTTTATTCAACA | 103 | 1383 |
| 1316787 | N/A | N/A | 94007 | 94026 | GATCAACTAACATCAATCTT | 81 | 1384 |
| 1316808 | N/A | N/A | 80861 | 80880 | AGTTTCTAATATCTTGAACC | 63 | 1385 |
| 1316811 | N/A | N/A | 35329 | 35348 | CTTGTTTTACCACCCATGCT | 81 | 1386 |
| 1316890 | N/A | N/A | 138491 | 138510 | TGCAAAGTACTATACTGGCC | 78 | 1387 |
| 1316893 | N/A | N/A | 13897 | 13916 | CCATCTACAGCTACTAGGAA | 45 | 1388 |
| 1316898 | N/A | N/A | 24730 | 24749 | GATGTGCTATTTTTGAAGCA | 101 | 1389 |
| 1316911 | N/A | N/A | 8779 | 8798 | TGTCTCTAACATACATTCTA | 70 | 1390 |
| 1316925 | N/A | N/A | 110976 | 110995 | TGCTACATCCAGACAGGCTC | 89 | 1391 |
| 1316970 | N/A | N/A | 81232 | 81251 | TTCTGACCTTTTCATGGGTA | 103 | 1392 |
| 1317063 | N/A | N/A | 127113 | 127132 | AAGACATCCACCAAGCATTT | 75 | 1393 |
| 1317125 | N/A | N/A | 2979 | 2998 | TCTTCCTTCCCATCAGGAGC | 86 | 1394 |
| 1317130 | N/A | N/A | 105117 | 105136 | TCAAAATTTAATTCACGGCA | 32 | 1395 |
| 1317161 | N/A | N/A | 74278 | 74297 | GCACAGACATTACCTCTCCA | 89 | 1396 |
| 1317225 | N/A | N/A | 48828 | 48847 | GCACGCATTCCATACAGAAA | 45 | 1397 |

TABLE 20
Reduction of HTT RNA by 5-10-5 MOE gapmers with mixed PO/PS internucleoside
linkages in A431 cells

| | SEQ | SEQ | SEQ | SEQ | | | |
|---|---|---|---|---|---|---|---|
| | ID No: | ID No: | ID No: | ID No: | | HTT | SEQ |
| Compound | 1 Start | 1 Stop | 2 Start | 2 Stop | | (% | ID |
| Number | Site | Site | Site | Site | Sequence (5′ to 3′) | UTC) | NO |
| 388241 | 4862 | 4881 | 106917 | 106936 | CTCAGTAACATTGACACCAC | 22 | 858 |
| 1314492 | N/A | N/A | 106788 | 106807 | AAAGGGTACCCTTATCAGGC | 103 | 1398 |
| 1314497 | N/A | N/A | 52707 | 52726 | GTACCTTCAGTTAATCCTCA | 46 | 1399 |
| 1314501 | N/A | N/A | 43312 | 43331 | GCATTATCTTCAATTCATGA | 55 | 1400 |
| 1314522 | N/A | N/A | 73033 | 73052 | ACAACAGTCTTCCTTTCTCT | 91 | 1401 |
| 1314556 | N/A | N/A | 18231 | 18250 | ACTGCACCAATATCATTACA | 86 | 1402 |
| 1314565 | N/A | N/A | 22425 | 22444 | GACCATCTCATCCTGGGCAA | 83 | 1403 |
| 1314695 | N/A | N/A | 17012 | 17031 | TCTGTGTTAATTTAGAGAAA | 77 | 1404 |
| 1314731 | N/A | N/A | 46048 | 46067 | GCACCCACATTTCCTTCACC | 83 | 1405 |
| 1314810 | 5815 | 5834 | 130398 | 130417 | GTACTATTTCTCTATTGCAC | 10 | 1406 |
| 1314838 | N/A | N/A | 109946 | 109965 | CTGCTGTCAATCTCACCAGA | 76 | 1407 |
| 1314896 | N/A | N/A | 48815 | 48834 | ACAGAAAAAAATTCTTCCGT | 56 | 1408 |
| 1315009 | N/A | N/A | 117370 | 117389 | GCATCTCTTTCTATAGGTCT | 51 | 1409 |
| 1315027 | N/A | N/A | 107757 | 107776 | TGTCTTTGAATTCTTATGCC | 22 | 1410 |
| 1315069 | N/A | N/A | 112815 | 112834 | GCTATGTAACTCAAGGGCAA | 79 | 1411 |
| 1315094 | N/A | N/A | 81169 | 81188 | CTCAGATGACTTTATCCCCA | 48 | 1412 |
| 1315155 | N/A | N/A | 145069 | 145088 | ATCATCTTATTTCAGCGGGC | 21 | 1413 |
| 1315170 | N/A | N/A | 34469 | 34488 | TGCTACACTCTAACACATAT | 103 | 1414 |
| 1315261 | N/A | N/A | 100760 | 100779 | TCTGAGCTTTTTTCTGCTAC | 76 | 1415 |
| 1315363 | N/A | N/A | 118069 | 118088 | AGCTCATTTATACTACCTCC | 51 | 1416 |
| 1315404 | N/A | N/A | 45477 | 45496 | AGAATGGTTTCTAATACGAA | 78 | 1417 |
| 1315496 | N/A | N/A | 13547 | 13566 | GTTCAATTACCATAATGGTT | 38 | 1418 |
| 1315550 | N/A | N/A | 141344 | 141363 | GCTTTTTATTCAACATTTTA | 81 | 1419 |
| 1315552 | N/A | N/A | 65282 | 65301 | CGTTTTTTTATATTTTCCTT | 28 | 1420 |
| 1315589 | N/A | N/A | 80835 | 80854 | GGAGAAACTTTCTCTCACTT | 78 | 1421 |
| 1315611 | N/A | N/A | 26533 | 26552 | ACACAATTTAATCCTCACAC | 105 | 1422 |
| 1315655 | N/A | N/A | 53111 | 53130 | CCAAGCCACATTCAAGATCT | 80 | 1423 |
| 1315685 | N/A | N/A | 69250 | 69269 | TGACCATACAACTAACTGGC | 64 | 1424 |
| 1315767 | N/A | N/A | 39207 | 39226 | GCATCAGCAATTCCAAGTGC | 79 | 1425 |
| 1315858 | N/A | N/A | 68246 | 68265 | TCTAAGCTTATCAAATTCCT | 58 | 1426 |
| 1315871 | N/A | N/A | 33714 | 33733 | CATACCTTAATTTCATTGTC | 62 | 1427 |
| 1315910 | N/A | N/A | 128895 | 128914 | ACAGCACTCCTCTATATCTT | 45 | 1428 |
| 1315926 | N/A | N/A | 134916 | 134935 | CTTGTTTAAACCTTTTTCTT | 77 | 1429 |
| 1315980 | N/A | N/A | 60915 | 60934 | TACTTGATAACATCATTCCT | 86 | 1430 |
| 1316008 | N/A | N/A | 15308 | 15327 | ACCTTTTTTTTTCCTACTTT | 62 | 1431 |
| 1316011 | N/A | N/A | 60152 | 60171 | GCATGCTTCCTTCTGCTCAA | 97 | 1432 |
| 1316044 | N/A | N/A | 158859 | 158878 | GCTGAGAGTCTTTCTAGAAA | 31 | 1433 |
| 1316063 | N/A | N/A | 22965 | 22984 | CTATTGTTTTTATATCAGTC | 62 | 1434 |
| 1316084 | 3864 | 3883 | 83463 | 83482 | TTTCAGGACATCATGCAGTT | 35 | 1435 |
| 1316149 | N/A | N/A | 115609 | 115628 | GCATGCAAATATCTTTTCAC | 81 | 1436 |
| 1316164 | N/A | N/A | 44799 | 44818 | AGCAAAGACCACATTTTCTG | 75 | 1437 |
| 1316170 | N/A | N/A | 72290 | 72309 | GAACGGATTTTTAACTTTCT | 22 | 1438 |
| 1316177 | N/A | N/A | 133660 | 133679 | CTGTGTTTCCAGCATTACCT | 72 | 1439 |
| 1316182 | N/A | N/A | 55646 | 55665 | AGTTTGTTAACTACTATACT | 72 | 1440 |
| 1316187 | N/A | N/A | 94006 | 94025 | ATCAACTAACATCAATCTTC | 105 | 1441 |
| 1316217 | N/A | N/A | 74103 | 74122 | CCATGACTGTCACCACCACA | 58 | 1442 |
| 1316228 | N/A | N/A | 70339 | 70358 | AATCCAGATTATACATCTCC | 39 | 1443 |
| 1316251 | N/A | N/A | 105074 | 105093 | GTTGCATCGCTTCTTGGCCT | 95 | 1444 |
| 1316261 | N/A | N/A | 41328 | 41347 | CCTCAATTCTAGATACACTC | 71 | 1445 |
| 1316296 | N/A | N/A | 10358 | 10377 | CACTAATCTATTCTCCATCC | 91 | 1446 |
| 1316305 | 11851 | 11870 | 168600 | 168619 | CTCATATTCATCTCCGGAGC | 57 | 1447 |
| 1316315 | N/A | N/A | 24691 | 24710 | TCATGATCCCAATCTAACTA | 78 | 1448 |
| 1316348 | N/A | N/A | 2891 | 2910 | ACTACAGTAAATTTCTGGAT | 64 | 1449 |
| 1316378 | N/A | N/A | 59071 | 59090 | ATCATCTAAACTTAAACCTT | 88 | 1450 |
| 1316391 | N/A | N/A | 110920 | 110939 | TCCACAGCCACCCTGTCCTC | 93 | 1451 |
| 1316429 | N/A | N/A | 19249 | 19268 | CTCAGTTTTTCCTCTTGCCA | 47 | 1452 |
| 1316494 | N/A | N/A | 103431 | 103450 | TCAACAACTTTACTATACCC | 102 | 1453 |
| 1316534 | N/A | N/A | 12465 | 12484 | GTTTGATTAGAAACTTTCTT | 55 | 1454 |
| 1316563 | N/A | N/A | 56464 | 56483 | GTCATTTTCATCAGCTATTC | 16 | 1455 |
| 1316590 | N/A | N/A | 50757 | 50776 | ACAACTCTACCTTCATCTGT | 75 | 1456 |
| 1316612 | N/A | N/A | 78813 | 78832 | ACAGAGTTCCTTTATGGGTT | 73 | 1457 |
| 1316789 | N/A | N/A | 47351 | 47370 | CATGTTGTTTTCTAAATTCC | 88 | 1458 |
| 1316810 | N/A | N/A | 131469 | 131488 | AGGAGGTTTTATTTTCCTCC | 81 | 1459 |
| 1316824 | 6757 | 6776 | 138424 | 138443 | ACAGATCATTCAACTTGCTC | 86 | 1460 |
| 1316834 | N/A | N/A | 22137 | 22156 | TGCCTCTTCCCCTATTTCTG | 61 | 1461 |
| 1316861 | N/A | N/A | 127078 | 127097 | GTCTGTCTCCTCCAACAGAA | 87 | 1462 |
| 1316920 | N/A | N/A | 149164 | 149183 | GCCTGATAAAATCTCTGCAA | 70 | 1463 |
| 1316929 | N/A | N/A | 6190 | 6209 | CCGCATTCAAAATCCAGTCA | 34 | 1464 |
| 1316962 | N/A | N/A | 5768 | 5787 | TCATACACCCTTACACTAGA | 74 | 1465 |
| 1316963 | N/A | N/A | 98417 | 98436 | ACATTACAACCATTCTTTCA | 79 | 1466 |
| 1317027 | N/A | N/A | 35179 | 35198 | TTTCAGTTTTTTTAGAGATA | 81 | 1467 |
| 1317032 | N/A | N/A | 20004 | 20023 | TGTTCCATCTTCACAGGGCC | 65 | 1468 |
| 1317044 | N/A | N/A | 124824 | 124843 | CTGATTTAAATTTCAGGCCG | 81 | 1469 |
| 1317057 | N/A | N/A | 17658 | 17677 | TAGGTAATTAATCTGAACTT | 71 | 1470 |
| 1317145 | N/A | N/A | 134250 | 134269 | TCTCACACACACAATCCCTG | 95 | 1471 |
| 1317173 | N/A | N/A | 119001 | 119020 | CTACTTGTTATCATTTCTGT | 71 | 1472 |
| 1317200 | N/A | N/A | 8777 | 8796 | TCTCTAACATACATTCTAGC | 82 | 1473 |
| 1317213 | N/A | N/A | 31963 | 31982 | GGCACACATCCCATAAGTCT | 76 | 1474 |

TABLE 21
Reduction of HTT RNA by 5-10-5 MOE gapmers with mixed PO/PS internucleoside
linkages in A431 cells

| | SEQ | SEQ | SEQ | SEQ | | | |
|---|---|---|---|---|---|---|---|
| | ID No: | ID No: | ID No: | ID No: | | HTT | SEQ |
| Compound | 1 Start | 1 Stop | 2 Start | 2 Stop | | (% | ID |
| Number | Site | Site | Site | Site | Sequence (5′ to 3′) | UTC) | NO |
| 388241 | 4862 | 4881 | 106917 | 106936 | CTCAGTAACATTGACACCAC | 27 | 858 |
| 1314477 | N/A | N/A | 83308 | 83327 | GCCAAGTTTTAAAGAGATTA | 65 | 1475 |
| 1314525 | N/A | N/A | 65281 | 65300 | GTTTTTTTATATTTTCCTTA | 40 | 1476 |
| 1314550 | N/A | N/A | 34465 | 34484 | ACACTCTAACACATATTCCT | 94 | 1477 |
| 1314573 | N/A | N/A | 19248 | 19267 | TCAGTTTTTCCTCTTGCCAT | 79 | 1478 |
| 1314587 | N/A | N/A | 46045 | 46064 | CCCACATTTCCTTCACCTCA | 86 | 1479 |
| 1314624 | N/A | N/A | 112800 | 112819 | GGCAAATCATCATAATCATC | 49 | 1480 |
| 1314697 | N/A | N/A | 56457 | 56476 | TCATCAGCTATTCAGAACTC | 48 | 1481 |
| 1314709 | 11144 | 11163 | 167893 | 167912 | ACAGAGTTCCAACATTTCCT | 54 | 1482 |
| 1314728 | N/A | N/A | 53106 | 53125 | CCACATTCAAGATCTCGACT | 71 | 1483 |
| 1314755 | N/A | N/A | 72289 | 72308 | AACGGATTTTTAACTTTCTT | 32 | 1484 |
| 1314758 | N/A | N/A | 60914 | 60933 | ACTTGATAACATCATTCCTT | 88 | 1485 |
| 1314777 | N/A | N/A | 158715 | 158734 | TTCTTCACTTTCAATCTGCT | 54 | 1486 |
| 1314869 | N/A | N/A | 81167 | 81186 | CAGATGACTTTATCCCCACT | 40 | 1487 |
| 1314947 | N/A | N/A | 16983 | 17002 | AGTAATATAAAATCTTCCTA | 100 | 1488 |
| 1314991 | N/A | N/A | 52704 | 52723 | CCTTCAGTTAATCCTCATCT | 53 | 1489 |
| 1315007 | N/A | N/A | 31962 | 31981 | GCACACATCCCATAAGTCTC | 73 | 1490 |
| 1315032 | N/A | N/A | 98412 | 98431 | ACAACCATTCTTTCATGCAT | 86 | 1491 |
| 1315042 | N/A | N/A | 33713 | 33732 | ATACCTTAATTTCATTGTCA | 44 | 1492 |
| 1315047 | N/A | N/A | 17589 | 17608 | GAGAAATGTATCATTTCCCT | 101 | 1493 |
| 1315215 | N/A | N/A | 133652 | 133671 | CCAGCATTACCTCTGAGCGA | 94 | 1494 |
| 1315315 | N/A | N/A | 115526 | 115545 | AGGTGTACTCTTACAGCAAC | 43 | 1495 |
| 1315359 | N/A | N/A | 22397 | 22416 | GCTTTGAAATCCACTTTGTC | 91 | 1496 |
| 1315384 | N/A | N/A | 106787 | 106806 | AAGGGTACCCTTATCAGGCA | 90 | 1497 |
| 1315448 | 6755 | 6774 | 138422 | 138441 | AGATCATTCAACTTGCTCCA | 94 | 1498 |
| 1315472 | N/A | N/A | 77967 | 77986 | TTCCACCTCAAATCATCATC | 98 | 1499 |
| 1315517 | N/A | N/A | 141335 | 141354 | TCAACATTTTACATTTGTGC | 75 | 1500 |
| 1315577 | N/A | N/A | 131466 | 131485 | AGGTTTTATTTTCCTCCGTT | 82 | 1501 |
| 1315578 | N/A | N/A | 60025 | 60044 | GCTTTGATTTTTACCAGTTA | 13 | 1502 |
| 1315585 | N/A | N/A | 128815 | 128834 | GTATTGTAAATTATGTGTCA | 28 | 1503 |
| 1315587 | N/A | N/A | 118068 | 118087 | GCTCATTTATACTACCTCCT | 43 | 1504 |
| 1315616 | N/A | N/A | 144457 | 144476 | CCTCAGTTCATTTTAGAAAA | 91 | 1505 |
| 1315625 | N/A | N/A | 35002 | 35021 | ATAGATTTTTTTTAATGCCA | 44 | 1506 |
| 1315630 | N/A | N/A | 6176 | 6195 | CAGTCAGTCATTCCTCACAC | 44 | 1507 |
| 1315631 | N/A | N/A | 41169 | 41188 | GGACTGGAACATCTTCGATC | 74 | 1508 |
| 1315643 | N/A | N/A | 15307 | 15326 | CCTTTTTTTTTCCTACTTTT | 72 | 1509 |
| 1315690 | N/A | N/A | 118972 | 118991 | TGGTAGTTACCTCCAAAATT | 87 | 1510 |
| 1315715 | N/A | N/A | 18230 | 18249 | CTGCACCAATATCATTACAC | 71 | 1511 |
| 1315732 | N/A | N/A | 13500 | 13519 | AGGGAACATTATTCATTTCA | 48 | 1512 |
| 1315802 | N/A | N/A | 94005 | 94024 | TCAACTAACATCAATCTTCA | 97 | 1513 |
| 1315808 | N/A | N/A | 12451 | 12470 | TTTCTTTCTTTCTCAGCAGT | 23 | 1514 |
| 1315813 | N/A | N/A | 70338 | 70357 | ATCCAGATTATACATCTCCA | 29 | 1515 |
| 1315836 | N/A | N/A | 74004 | 74023 | TTCTGCCTCCTTCATTCTCT | 101 | 1516 |
| 1315873 | N/A | N/A | 48780 | 48799 | CAAGGCAGATTAACATTTCC | 88 | 1517 |
| 1315929 | N/A | N/A | 39108 | 39127 | TTGGCAGTTTCTACTGCAGC | 114 | 1518 |
| 1315995 | N/A | N/A | 69249 | 69268 | GACCATACAACTAACTGGCC | 88 | 1519 |
| 1315998 | N/A | N/A | 149127 | 149146 | ACCAGGTACTACTCATGGCC | 77 | 1520 |
| 1316038 | N/A | N/A | 8774 | 8793 | CTAACATACATTCTAGCCCC | 75 | 1521 |
| 1316065 | N/A | N/A | 126944 | 126963 | GTCCAGTATCCATACTGAGC | 77 | 1522 |
| 1316075 | N/A | N/A | 22133 | 22152 | TCTTCCCCTATTTCTGGCTT | 87 | 1523 |
| 1316133 | N/A | N/A | 134194 | 134213 | AAAGTTTAACTTATTCTGCA | 53 | 1524 |
| 1316225 | N/A | N/A | 44798 | 44817 | GCAAAGACCACATTTTCTGT | 83 | 1525 |
| 1316267 | N/A | N/A | 22963 | 22982 | ATTGTTTTTATATCAGTCAA | 97 | 1526 |
| 1316298 | N/A | N/A | 10357 | 10376 | ACTAATCTATTCTCCATCCC | 92 | 1527 |
| 1316329 | N/A | N/A | 134915 | 134934 | TTGTTTAAACCTTTTTCTTC | 81 | 1528 |
| 1316345 | N/A | N/A | 26532 | 26551 | CACAATTTAATCCTCACACA | 94 | 1529 |
| 1316399 | N/A | N/A | 43286 | 43305 | TAAGAATCATTTTAAGCCAC | 99 | 1530 |
| 1316456 | N/A | N/A | 45474 | 45493 | ATGGTTTCTAATACGAACTA | 90 | 1531 |
| 1316460 | N/A | N/A | 24652 | 24671 | TTTCTCTTTATCTCTAGGTA | 75 | 1532 |
| 1316467 | N/A | N/A | 68241 | 68260 | GCTTATCAAATTCCTGATAA | 67 | 1533 |
| 1316505 | N/A | N/A | 2748 | 2767 | GCTCTCCGAATCATTTTCTA | 92 | 1534 |
| 1316540 | N/A | N/A | 103281 | 103300 | GTTTAGTAATAAGATACCCA | 68 | 1535 |
| 1316622 | N/A | N/A | 107598 | 107617 | ACCAACACTGTCAATTGATT | 42 | 1536 |
| 1316640 | N/A | N/A | 55645 | 55664 | GTTTGTTAACTACTATACTA | 64 | 1537 |
| 1316768 | N/A | N/A | 117323 | 117342 | GGAGAACCTTTTTAATATCA | 28 | 1538 |
| 1316803 | 5814 | 5833 | 130397 | 130416 | TACTATTTCTCTATTGCACA | 25 | 1539 |
| 1316817 | 2526 | 2545 | 59005 | 59024 | TGTGAGGGTTCTAATGGTGC | 48 | 1540 |
| 1316865 | N/A | N/A | 110865 | 110884 | ACATGCCACATCTAAGCCAC | 97 | 1541 |
| 1316868 | N/A | N/A | 73030 | 73049 | ACAGTCTTCCTTTCTCTTGC | 85 | 1542 |
| 1316875 | N/A | N/A | 105008 | 105027 | ACAGGAACTTTATATTCAGA | 49 | 1543 |
| 1316897 | N/A | N/A | 109894 | 109913 | CTCAAGATAACATTCCATTA | 51 | 1544 |
| 1316966 | N/A | N/A | 80834 | 80853 | GAGAAACTTTCTCTCACTTT | 79 | 1545 |
| 1317028 | N/A | N/A | 50599 | 50618 | GGATAAACTCATCTGAGCAA | 52 | 1546 |
| 1317038 | N/A | N/A | 123151 | 123170 | TTGTTTTTCATTTAAGGCTG | 76 | 1547 |
| 1317176 | N/A | N/A | 47264 | 47283 | AATGAAGATCTCTATTTCCC | 81 | 1548 |
| 1317182 | N/A | N/A | 100740 | 100759 | AGGAAACTGACTACTCAGCC | 79 | 1549 |
| 1317187 | N/A | N/A | 19977 | 19996 | TGTGTGTAAAATCTCCCTCT | 87 | 1550 |
| 1317188 | N/A | N/A | 4723 | 4742 | CTGACATTTCCCTATCCCCT | 82 | 1551 |

TABLE 22
Reduction of HTT RNA by 5-10-5 MOE gapmers with mixed PO/PS internucleoside
linkages in A431 cells

| | SEQ | SEQ | SEQ | SEQ | | | |
|---|---|---|---|---|---|---|---|
| | ID No: | ID No: | ID No: | ID No: | | HTT | SEQ |
| Compound | 1 Start | 1 Stop | 2 Start | 2 Stop | | (% | ID |
| Number | Site | Site | Site | Site | Sequence (5′ to 3′) | UTC) | NO |
| 388241 | 4862 | 4881 | 106917 | 106936 | CTCAGTAACATTGACACCAC | 31 | 858 |
| 1314482 | N/A | N/A | 16953 | 16972 | GGTCACCTATATCTTTCAGA | 50 | 1552 |
| 1314539 | N/A | N/A | 65270 | 65289 | TTTTCCTTAAATTCTGTTCA | 43 | 1553 |
| 1314627 | N/A | N/A | 18229 | 18248 | TGCACCAATATCATTACACA | 86 | 1554 |
| 1314635 | N/A | N/A | 15280 | 15299 | CGTTGTATTCTACAATAGCA | 36 | 1555 |
| 1314677 | N/A | N/A | 118968 | 118987 | AGTTACCTCCAAAATTCTAA | 82 | 1556 |
| 1314683 | N/A | N/A | 53090 | 53109 | GACTCCAGTCCTATTCTCCT | 84 | 1557 |
| 1314692 | N/A | N/A | 107168 | 107187 | AAGGATACACACCAACAACA | 81 | 1558 |
| 1314812 | N/A | N/A | 52703 | 52722 | CTTCAGTTAATCCTCATCTT | 74 | 1559 |
| 1314815 | N/A | N/A | 104960 | 104979 | GTTTCTTGAATTTTTTTCCC | 36 | 1560 |
| 1314833 | N/A | N/A | 68216 | 68235 | TCCTCTTTCACTGCTTCTAC | 32 | 1561 |
| 1314867 | N/A | N/A | 56453 | 56472 | CAGCTATTCAGAACTCAGAA | 23 | 1562 |
| 1314874 | N/A | N/A | 2566 | 2585 | ACCAGAGTACTTCCTAACTC | 65 | 1563 |
| 1314886 | 883 | 902 | N/A | N/A | AAACCTTAATTTCATTGTCA | 39 | 1564 |
| 1314910 | N/A | N/A | 81162 | 81181 | GACTTTATCCCCACTTTCTC | 66 | 1565 |
| 1314911 | N/A | N/A | 58843 | 58862 | GGAGATAAATTGCTCAGCCA | 88 | 1566 |
| 1314966 | N/A | N/A | 128708 | 128727 | GCACTTTGCAATAATACAGC | 28 | 1567 |
| 1314994 | N/A | N/A | 117322 | 117341 | GAGAACCTTTTTAATATCAA | 56 | 1568 |
| 1315021 | N/A | N/A | 19954 | 19973 | TCCTTTTTATATATATGTGA | 76 | 1569 |
| 1315035 | N/A | N/A | 122708 | 122727 | GCAAAATTCAATTCCAGAGA | 49 | 1570 |
| 1315138 | N/A | N/A | 10356 | 10375 | CTAATCTATTCTCCATCCCT | 100 | 1571 |
| 1315141 | 5800 | 5819 | 130383 | 130402 | TGCACATTCCAAGTTTGGCT | 27 | 1572 |
| 1315152 | N/A | N/A | 35001 | 35020 | TAGATTTTTTTTAATGCCAA | 78 | 1573 |
| 1315161 | N/A | N/A | 72261 | 72280 | TACATTTTACTCCAATGCCA | 52 | 1574 |
| 1315178 | N/A | N/A | 70337 | 70356 | TCCAGATTATACATCTCCAT | 36 | 1575 |
| 1315214 | N/A | N/A | 126801 | 126820 | GGTCACAGCTTTTATTTCCA | 13 | 1576 |
| 1315228 | N/A | N/A | 22105 | 22124 | TTCACCATTTTTATTATTCT | 95 | 1577 |
| 1315259 | N/A | N/A | 106777 | 106796 | TTATCAGGCATTTCATGGAA | 96 | 1578 |
| 1315339 | N/A | N/A | 43220 | 43239 | GCACAATAAAAACCCTGACA | 101 | 1579 |
| 1315345 | N/A | N/A | 19198 | 19217 | GCTCTCCACATTCATTTTCC | 75 | 1580 |
| 1315405 | 6243 | 6262 | 133601 | 133620 | GTTGAGTTCTTCCATTGGCA | 26 | 1581 |
| 1315507 | N/A | N/A | 34464 | 34483 | CACTCTAACACATATTCCTT | 98 | 1582 |
| 1315525 | N/A | N/A | 77966 | 77985 | TCCACCTCAAATCATCATCA | 79 | 1583 |
| 1315543 | N/A | N/A | 12378 | 12397 | ACAGTCTAATACCTACTCTA | 77 | 1584 |
| 1315604 | N/A | N/A | 134191 | 134210 | GTTTAACTTATTCTGCAGTC | 31 | 1585 |
| 1315618 | N/A | N/A | 17582 | 17601 | GTATCATTTCCCTCATTTCC | 52 | 1586 |
| 1315659 | N/A | N/A | 31577 | 31596 | ACGAAGCATTTTCTTTCCTT | 73 | 1587 |
| 1315755 | N/A | N/A | 141297 | 141316 | AGGGATAGACAGACTAGCCT | 52 | 1588 |
| 1315772 | N/A | N/A | 109846 | 109865 | AGGCAGTAACATCAATATCA | 82 | 1589 |
| 1315787 | N/A | N/A | 47190 | 47209 | TCAGCTTGACACACATTTAA | 86 | 1590 |
| 1315789 | N/A | N/A | 60910 | 60929 | GATAACATCATTCCTTGCAT | 67 | 1591 |
| 1315798 | N/A | N/A | 103114 | 103133 | GCCTGGTTTTCTCAGAGCCT | 92 | 1592 |
| 1315800 | N/A | N/A | 80809 | 80828 | TGTGTATTATATTTATTTCT | 35 | 1593 |
| 1315968 | N/A | N/A | 48778 | 48797 | AGGCAGATTAACATTTCCTG | 41 | 1594 |
| 1315991 | N/A | N/A | 44708 | 44727 | GACTGAACTTCTCCAGGCCC | 92 | 1595 |
| 1315993 | N/A | N/A | 73027 | 73046 | GTCTTCCTTTCTCTTGCAAT | 82 | 1596 |
| 1315997 | N/A | N/A | 149126 | 149145 | CCAGGTACTACTCATGGCCT | 99 | 1597 |
| 1316003 | N/A | N/A | 94002 | 94021 | ACTAACATCAATCTTCATTA | 80 | 1598 |
| 1316017 | N/A | N/A | 55642 | 55661 | TGTTAACTACTATACTATTA | 65 | 1599 |
| 1316068 | N/A | N/A | 24525 | 24544 | TTAGCAGTATTTCAGACCTT | 70 | 1600 |
| 1316071 | N/A | N/A | 73997 | 74016 | TCCTTCATTCTCTTACAATC | 73 | 1601 |
| 1316074 | 6653 | 6672 | 138320 | 138339 | GCCAGAGTCACCTCACGGGC | 89 | 1602 |
| 1316156 | N/A | N/A | 22960 | 22979 | GTTTTTATATCAGTCAATCC | 36 | 1603 |
| 1316172 | N/A | N/A | 6175 | 6194 | AGTCAGTCATTCCTCACACT | 49 | 1604 |
| 1316193 | N/A | N/A | 83248 | 83267 | ATTCAAGTATTTCCTCTGAC | 35 | 1605 |
| 1316201 | N/A | N/A | 45473 | 45492 | TGGTTTCTAATACGAACTAC | 83 | 1606 |
| 1316271 | N/A | N/A | 118067 | 118086 | CTCATTTATACTACCTCCTA | 80 | 1607 |
| 1316276 | N/A | N/A | 98411 | 98430 | CAACCATTCTTTCATGCATT | 86 | 1608 |
| 1316370 | N/A | N/A | 13495 | 13514 | ACATTATTCATTTCAGTGTC | 55 | 1609 |
| 1316373 | N/A | N/A | 115514 | 115533 | ACAGCAACAAATATTTTCAA | 68 | 1610 |
| 1316402 | N/A | N/A | 8712 | 8731 | AGGTATTTTATTTTTCCTCC | 48 | 1611 |
| 1316462 | N/A | N/A | 50465 | 50484 | ACATTAATTTTTCCTAGAAT | 96 | 1612 |
| 1316474 | N/A | N/A | 26487 | 26506 | GCCACAAAAACATTGATCCC | 79 | 1613 |
| 1316481 | N/A | N/A | 59983 | 60002 | CAGTTGTGACTTATGAGCCA | 66 | 1614 |
| 1316506 | 3138 | 3157 | 69111 | 69130 | AAGGTTATTTTCCATAGTGA | 22 | 1615 |
| 1316514 | N/A | N/A | 112799 | 112818 | GCAAATCATCATAATCATCT | 68 | 1616 |
| 1316567 | N/A | N/A | 22381 | 22400 | TGTCTGATATTAACAGAACC | 83 | 1617 |
| 1316610 | N/A | N/A | 110832 | 110851 | TGGTTTTGCTTTCATGCTGC | 88 | 1618 |
| 1316647 | N/A | N/A | 46044 | 46063 | CCACATTTCCTTCACCTCAT | 87 | 1619 |
| 1316690 | N/A | N/A | 134914 | 134933 | TGTTTAAACCTTTTTCTTCA | 76 | 1620 |
| 1316724 | N/A | N/A | 144454 | 144473 | CAGTTCATTTTAGAAAACCC | 47 | 1621 |
| 1316739 | N/A | N/A | 131464 | 131483 | GTTTTATTTTCCTCCGTTTA | 82 | 1622 |
| 1316878 | N/A | N/A | 100616 | 100635 | CATCAATGATATCCCTTCTA | 78 | 1623 |
| 1316883 | N/A | N/A | 4638 | 4657 | GTCTATGTCCTTCATTAGAA | 49 | 1624 |
| 1316955 | N/A | N/A | 158714 | 158733 | TCTTCACTTTCAATCTGCTC | 43 | 1625 |
| 1317071 | 11139 | 11158 | 167888 | 167907 | GTTCCAACATTTCCTCCACT | 58 | 1626 |
| 1317098 | N/A | N/A | 41155 | 41174 | TCGATCGGAAATATCTGCAA | 87 | 1627 |
| 1317158 | N/A | N/A | 38809 | 38828 | AGAACACTTAATCCATGGTC | 75 | 1628 |

TABLE 23
Reduction of HTT RNA by 5-10-5 MOE gapmers with mixed PO/PS internucleoside
linkages in A431 cells

| | SEQ | SEQ | SEQ | SEQ | | | |
|---|---|---|---|---|---|---|---|
| | ID No: | ID No: | ID No: | ID No: | | HTT | SEQ |
| Compound | 1 Start | 1 Stop | 2 Start | 2 Stop | | (% | ID |
| Number | Site | Site | Site | Site | Sequence (5′ to 3′) | UTC) | NO |
| 388241 | 4862 | 4881 | 106917 | 106936 | CTCAGTAACATTGACACCAC | 36 | 858 |
| 1314607 | N/A | N/A | 19197 | 19216 | CTCTCCACATTCATTTTCCT | 70 | 1629 |
| 1314611 | N/A | N/A | 65256 | 65275 | TGTTCATTAAACATGTATTA | 64 | 1630 |
| 1314614 | N/A | N/A | 44660 | 44679 | GGTTTAGTAATTATTTGCTT | 61 | 1631 |
| 1314615 | N/A | N/A | 77963 | 77982 | ACCTCAAATCATCATCAGGC | 95 | 1632 |
| 1314719 | N/A | N/A | 34457 | 34476 | ACACATATTCCTTTATTTTA | 91 | 1633 |
| 1314746 | N/A | N/A | 22104 | 22123 | TCACCATTTTTATTATTCTA | 114 | 1634 |
| 1314772 | N/A | N/A | 48777 | 48796 | GGCAGATTAACATTTCCTGC | 74 | 1635 |
| 1314800 | N/A | N/A | 134912 | 134931 | TTTAAACCTTTTTCTTCACA | 89 | 1636 |
| 1314803 | N/A | N/A | 109841 | 109860 | GTAACATCAATATCACATGC | 64 | 1637 |
| 1314837 | N/A | N/A | 141281 | 141300 | GCCTAGATTCCTTAGAACCA | 66 | 1638 |
| 1314859 | N/A | N/A | 98375 | 98394 | CACTCATTAATTCAATAAAC | 107 | 1639 |
| 1314900 | N/A | N/A | 15242 | 15261 | ATATTTTTATTTTCAGGACA | 80 | 1640 |
| 1314903 | 5778 | 5797 | 130361 | 130380 | CAAGTCAGAATCCTCCTCTT | 76 | 1641 |
| 1314905 | N/A | N/A | 8630 | 8649 | GGTTGACTTATTTACAGGAA | 9 | 1642 |
| 1314909 | N/A | N/A | 19939 | 19958 | TGTGATTGCATTTAGTGCCT | 64 | 1643 |
| 1315012 | N/A | N/A | 122518 | 122537 | GAGAAGGATTCATCACTCTC | 72 | 1644 |
| 1315016 | N/A | N/A | 118961 | 118980 | TCCAAAATTCTAACTGCTGT | 65 | 1645 |
| 1315020 | N/A | N/A | 118006 | 118025 | AAGCCTCTATATTTTGGTCT | 69 | 1646 |
| 1315034 | N/A | N/A | 18228 | 18247 | GCACCAATATCATTACACAC | 69 | 1647 |
| 1315064 | N/A | N/A | 149098 | 149117 | TGCCTTTTCATTTTAATTCA | 89 | 1648 |
| 1315106 | N/A | N/A | 133576 | 133595 | GCCATGCTGCTCTAATAGAC | 66 | 1649 |
| 1315282 | N/A | N/A | 17581 | 17600 | TATCATTTCCCTCATTTCCC | 42 | 1650 |
| 1315323 | N/A | N/A | 67762 | 67781 | CATGTGTTTTTTAAAGCAGT | 61 | 1651 |
| 1315343 | N/A | N/A | 126800 | 126819 | GTCACAGCTTTTATTTCCAT | 19 | 1652 |
| 1315351 | N/A | N/A | 22941 | 22960 | CAAAAGACTTTCAAATTTCC | 87 | 1653 |
| 1315374 | N/A | N/A | 83247 | 83266 | TTCAAGTATTTCCTCTGACC | 44 | 1654 |
| 1315433 | N/A | N/A | 24461 | 24480 | GGTCTTTGAAATGATAGATC | 86 | 1655 |
| 1315462 | N/A | N/A | 117318 | 117337 | ACCTTTTTAATATCAAGGGC | 94 | 1656 |
| 1315495 | N/A | N/A | 22378 | 22397 | CTGATATTAACAGAACCAGT | 79 | 1657 |
| 1315503 | N/A | N/A | 13351 | 13370 | TACAAAGTTCTTATTTTCTC | 89 | 1658 |
| 1315515 | 868 | 887 | 33698 | 33717 | TGTCATTTGCAAAATTGCCA | 64 | 1659 |
| 1315629 | N/A | N/A | 69010 | 69029 | ACATATATTTTTAAAGATCA | 98 | 1660 |
| 1315704 | N/A | N/A | 59956 | 59975 | TGGAAAGGTTCAACATGCTA | 92 | 1661 |
| 1315724 | N/A | N/A | 81127 | 81146 | CCAAATGTAAATATTCCATT | 77 | 1662 |
| 1315765 | N/A | N/A | 100615 | 100634 | ATCAATGATATCCCTTCTAA | 80 | 1663 |
| 1315782 | N/A | N/A | 41143 | 41162 | ATCTGCAATTTAACTGGACA | 84 | 1664 |
| 1315863 | N/A | N/A | 128650 | 128669 | TTGCAATTCAAATATGAGCA | 59 | 1665 |
| 1315916 | N/A | N/A | 26475 | 26494 | TTGATCCCATTTTATGGTTA | 86 | 1666 |
| 1315954 | N/A | N/A | 158626 | 158645 | GGACACAGAATTCCCATGGA | 74 | 1667 |
| 1315982 | N/A | N/A | 45456 | 45475 | TACGCGCCAAACAGCAATCA | 99 | 1668 |
| 1315985 | N/A | N/A | 52693 | 52712 | TCCTCATCTTTTATAAAGTA | 79 | 1669 |
| 1315994 | N/A | N/A | 10344 | 10363 | CCATCCCTAAAACTGTGCCA | 71 | 1670 |
| 1316045 | N/A | N/A | 34972 | 34991 | AAGGAAGTAATTAACGGATT | 79 | 1671 |
| 1316056 | N/A | N/A | 38581 | 38600 | GGTATGTACATTTCCTGTCA | 59 | 1672 |
| 1316057 | N/A | N/A | 107166 | 107185 | GGATACACACCAACAACACC | 69 | 1673 |
| 1316116 | N/A | N/A | 106764 | 106783 | CATGGAAATTACATTTGGAA | 101 | 1674 |
| 1316130 | N/A | N/A | 60909 | 60928 | ATAACATCATTCCTTGCATC | 87 | 1675 |
| 1316229 | N/A | N/A | 50454 | 50473 | TCCTAGAATCCTTTTGGCTT | 41 | 1676 |
| 1316257 | N/A | N/A | 143913 | 143932 | CTGCAGATTCTACCTTCATA | 75 | 1677 |
| 1316278 | N/A | N/A | 58828 | 58847 | AGCCATGGAACAATTCCCTA | 99 | 1678 |
| 1316288 | N/A | N/A | 31572 | 31591 | GCATTTTCTTTCCTTGTTAC | 75 | 1679 |
| 1316331 | N/A | N/A | 12365 | 12384 | TACTCTATATATACCAGGCT | 74 | 1680 |
| 1316389 | N/A | N/A | 72164 | 72183 | GGGAAAGCAATCATTCTAGA | 56 | 1681 |
| 1316609 | N/A | N/A | 72997 | 73016 | AGGCATGTCACAATACATTT | 93 | 1682 |
| 1316628 | N/A | N/A | 55577 | 55596 | GTAAAAGCAACTCCATTTCT | 69 | 1683 |
| 1316677 | N/A | N/A | 56443 | 56462 | GAACTCAGAAAACAGTATCA | 62 | 1684 |
| 1316683 | N/A | N/A | 16942 | 16961 | TCTTTCAGAAACATTAACAG | 83 | 1685 |
| 1316700 | N/A | N/A | 4262 | 4281 | AGATACTTTCTAAATTGCTT | 53 | 1686 |
| 1316708 | N/A | N/A | 70319 | 70338 | ATATTGTTAAAAATTCTCCA | 79 | 1687 |
| 1316727 | N/A | N/A | 53086 | 53105 | CCAGTCCTATTCTCCTGGAA | 91 | 1688 |
| 1316743 | 6603 | 6622 | 138270 | 138289 | AGAAATTTCACTCATCCCTA | 59 | 1689 |
| 1316764 | N/A | N/A | 103067 | 103086 | AGCTCAATAAATCTTTATCA | 84 | 1690 |
| 1316855 | N/A | N/A | 112730 | 112749 | AAGCAAACATTTTTACAACA | 86 | 1691 |
| 1316871 | N/A | N/A | 46040 | 46059 | ATTTCCTTCACCTCATCTGC | 91 | 1692 |
| 1316879 | N/A | N/A | 115513 | 115532 | CAGCAACAAATATTTTCAAC | 72 | 1693 |
| 1316903 | 11138 | 11157 | 167887 | 167906 | TTCCAACATTTCCTCCACTT | 69 | 1694 |
| 1316949 | N/A | N/A | 110735 | 110754 | CTCAAGGCTATTCTCAACTC | 91 | 1695 |
| 1316976 | N/A | N/A | 104955 | 104974 | TTGAATTTTTTTCCCTGAGA | 88 | 1696 |
| 1316984 | N/A | N/A | 134190 | 134209 | TTTAACTTATTCTGCAGTCA | 32 | 1697 |
| 1317000 | N/A | N/A | 43184 | 43203 | GTTCAAAAAATCCAATTGCT | 79 | 1698 |
| 1317054 | N/A | N/A | 93976 | 93995 | GACTTATTAATAATTTACTT | 98 | 1699 |
| 1317055 | N/A | N/A | 131436 | 131455 | TTTGTAAATTCTCCATGGTA | 87 | 1700 |
| 1317069 | N/A | N/A | 73990 | 74009 | TTCTCTTACAATCAGTGTCT | 65 | 1701 |
| 1317082 | N/A | N/A | 2565 | 2584 | CCAGAGTACTTCCTAACTCC | 88 | 1702 |
| 1317086 | N/A | N/A | 47189 | 47208 | CAGCTTGACACACATTTAAA | 96 | 1703 |
| 1317218 | N/A | N/A | 80807 | 80826 | TGTATTATATTTATTTCTCT | 84 | 1704 |
| 1317224 | N/A | N/A | 6173 | 6192 | TCAGTCATTCCTCACACTGC | 90 | 1705 |

TABLE 24
Reduction of HTT RNA by 5-10-5 MOE gapmers with mixed PO/PS internucleoside
linkages in A431 cells

| | SEQ | SEQ | SEQ | SEQ | | | |
|---|---|---|---|---|---|---|---|
| | ID No: | ID No: | ID No: | ID No: | | HTT | SEQ |
| Compound | 1 Start | 1 Stop | 2 Start | 2 Stop | | (% | ID |
| Number | Site | Site | Site | Site | Sequence (5′ to 3′) | UTC) | NO |
| 388241 | 4862 | 4881 | 106917 | 106936 | CTCAGTAACATTGACACCAC | 29 | 858 |
| 1314516 | N/A | N/A | 77962 | 77981 | CCTCAAATCATCATCAGGCA | 78 | 1706 |
| 1314578 | N/A | N/A | 107165 | 107184 | GATACACACCAACAACACCT | 81 | 1707 |
| 1314604 | N/A | N/A | 128216 | 128235 | GCAGCAGGAATTTCTGCAAC | 83 | 1708 |
| 1314629 | N/A | N/A | 48775 | 48794 | CAGATTAACATTTCCTGCTC | 82 | 1709 |
| 1314665 | N/A | N/A | 17573 | 17592 | CCCTCATTTCCCTAATACAT | 83 | 1710 |
| 1314742 | N/A | N/A | 58822 | 58841 | GGAACAATTCCCTACTATCA | 91 | 1711 |
| 1314748 | N/A | N/A | 12326 | 12345 | GTTAACTGACTACAATCAAC | 78 | 1712 |
| 1314775 | N/A | N/A | 22358 | 22377 | CTAGCTTGCATCTAATTCTT | 81 | 1713 |
| 1314813 | N/A | N/A | 8629 | 8648 | GTTGACTTATTTACAGGAAA | 20 | 1714 |
| 1314835 | N/A | N/A | 112729 | 112748 | AGCAAACATTTTTACAACAA | 58 | 1715 |
| 1314862 | N/A | N/A | 131319 | 131338 | ACAAAGAACATCTAACACCT | 73 | 1716 |
| 1314893 | N/A | N/A | 133545 | 133564 | AGTGTGTTTGTAACACCTAA | 90 | 1717 |
| 1314978 | N/A | N/A | 117976 | 117995 | GATGATGTAACCATATAATC | 66 | 1718 |
| 1314992 | N/A | N/A | 31509 | 31528 | TGGTAACTACTTTAAGGTCT | 71 | 1719 |
| 1315056 | N/A | N/A | 4246 | 4265 | GCTTTCATCAATCTTACTTT | 19 | 1720 |
| 1315058 | N/A | N/A | 72161 | 72180 | AAAGCAATCATTCTAGAGCA | 86 | 1721 |
| 1315062 | N/A | N/A | 117317 | 117336 | CCTTTTTAATATCAAGGGCT | 98 | 1722 |
| 1315086 | N/A | N/A | 34455 | 34474 | ACATATTCCTTTATTTTACT | 90 | 1723 |
| 1315092 | N/A | N/A | 100569 | 100588 | ATGCACACACTCACATGCTT | 91 | 1724 |
| 1315112 | N/A | N/A | 19191 | 19210 | ACATTCATTTTCCTGGGATA | 74 | 1725 |
| 1315119 | N/A | N/A | 115509 | 115528 | AACAAATATTTTCAACTGGC | 17 | 1726 |
| 1315173 | N/A | N/A | 72995 | 73014 | GCATGTCACAATACATTTTA | 77 | 1727 |
| 1315258 | N/A | N/A | 18226 | 18245 | ACCAATATCATTACACACTT | 64 | 1728 |
| 1315266 | N/A | N/A | 83246 | 83265 | TCAAGTATTTCCTCTGACCT | 45 | 1729 |
| 1315303 | N/A | N/A | 80806 | 80825 | GTATTATATTTATTTCTCTA | 56 | 1730 |
| 1315360 | N/A | N/A | 134909 | 134928 | AAACCTTTTTCTTCACAGCT | 66 | 1731 |
| 1315381 | N/A | N/A | 26400 | 26419 | AGTGACATTTTCCCAGGAGC | 43 | 1732 |
| 1315418 | N/A | N/A | 110734 | 110753 | TCAAGGCTATTCTCAACTCA | 84 | 1733 |
| 1315460 | N/A | N/A | 55378 | 55397 | TAGGAAGTTCTAACATAGGC | 42 | 1734 |
| 1315535 | N/A | N/A | 149097 | 149116 | GCCTTTTCATTTTAATTCAA | 102 | 1735 |
| 1315540 | N/A | N/A | 6172 | 6191 | CAGTCATTCCTCACACTGCC | 89 | 1736 |
| 1315573 | N/A | N/A | 45998 | 46017 | ACAGCACTGCTTTCATACTA | 97 | 1737 |
| 1315597 | N/A | N/A | 70299 | 70318 | AAGCATCACACTATATACTA | 55 | 1738 |
| 1315602 | 5774 | 5793 | 130357 | 130376 | TCAGAATCCTCCTCTTCTCC | 74 | 1739 |
| 1315622 | N/A | N/A | 22103 | 22122 | CACCATTTTTATTATTCTAA | 108 | 1740 |
| 1315763 | N/A | N/A | 22939 | 22958 | AAAGACTTTCAAATTTCCCT | 71 | 1741 |
| 1315779 | N/A | N/A | 93885 | 93904 | ACAGTCATAATAATAAGGTT | 79 | 1742 |
| 1315783 | N/A | N/A | 104939 | 104958 | GAGAAGATTACAAATTGCTG | 63 | 1743 |
| 1315805 | N/A | N/A | 109839 | 109858 | AACATCAATATCACATGCCT | 70 | 1744 |
| 1315822 | N/A | N/A | 143890 | 143909 | GCCTATACCATACAATTCTC | 82 | 1745 |
| 1315827 | N/A | N/A | 103066 | 103085 | GCTCAATAAATCTTTATCAG | 59 | 1746 |
| 1315849 | N/A | N/A | 67687 | 67706 | AGCTGAGTTCCTAATTCAGA | 77 | 1747 |
| 1315894 | 11137 | 11156 | 167886 | 167905 | TCCAACATTTCCTCCACTTA | 72 | 1748 |
| 1315896 | N/A | N/A | 73959 | 73978 | CCAAAGCCATTATCTTGCCT | 64 | 1749 |
| 1315924 | N/A | N/A | 118942 | 118961 | TGCTGCTATCCCTTGCAGCA | 113 | 1750 |
| 1315936 | N/A | N/A | 98237 | 98256 | ACACAACTATGATACAGCAA | 88 | 1751 |
| 1316033 | N/A | N/A | 42656 | 42675 | AGTCCACACCTCTAACTCTC | 85 | 1752 |
| 1316066 | N/A | N/A | 44659 | 44678 | GTTTAGTAATTATTTGCTTT | 90 | 1753 |
| 1316142 | N/A | N/A | 45447 | 45466 | AACAGCAATCATCCTAGAAT | 82 | 1754 |
| 1316184 | N/A | N/A | 59893 | 59912 | GGTTGAGTAAATAATCCCTA | 46 | 1755 |
| 1316223 | N/A | N/A | 52691 | 52710 | CTCATCTTTTATAAAGTACA | 79 | 1756 |
| 1316240 | N/A | N/A | 34941 | 34960 | AAAGTGTTAGCATCATCATA | 63 | 1757 |
| 1316274 | N/A | N/A | 158314 | 158333 | GCACGGATTTCACAACGGTG | 34 | 1758 |
| 1316319 | N/A | N/A | 50425 | 50444 | GTTTCACTAAAATCTCAAAC | 55 | 1759 |
| 1316340 | 763 | 782 | 33593 | 33612 | GCAGAAGGTTCACCAGGTAA | 54 | 1760 |
| 1316347 | N/A | N/A | 122516 | 122535 | GAAGGATTCATCACTCTCTC | 89 | 1761 |
| 1316361 | N/A | N/A | 10316 | 10335 | AAACATAGAATCATACAGTA | 91 | 1762 |
| 1316520 | N/A | N/A | 15227 | 15246 | GGACATATGCTCATTTGTTA | 38 | 1763 |
| 1316528 | N/A | N/A | 134175 | 134194 | AGTCATGGAAATACACTCAC | 51 | 1764 |
| 1316558 | N/A | N/A | 56406 | 56425 | AGCAAAGATATAATTAAGAT | 92 | 1765 |
| 1316564 | N/A | N/A | 106748 | 106767 | GGAAAACTGCTCTCAACATC | 83 | 1766 |
| 1316571 | N/A | N/A | 68944 | 68963 | GTCTCAACTTTTAAGTGAAA | 56 | 1767 |
| 1316737 | N/A | N/A | 41126 | 41145 | ACATGACCGCATACTACCCA | 75 | 1768 |
| 1316755 | N/A | N/A | 38404 | 38423 | AAGCATATATTTACACGAAC | 85 | 1769 |
| 1316770 | N/A | N/A | 24392 | 24411 | AGCTACACTTTTATATTTCC | 67 | 1770 |
| 1316802 | N/A | N/A | 126799 | 126818 | TCACAGCTTTTATTTCCATA | 17 | 1771 |
| 1316830 | N/A | N/A | 19905 | 19924 | AGATAGCCCCCTCATCTCAA | 79 | 1772 |
| 1316851 | N/A | N/A | 53071 | 53090 | TGGAAGATAAACCTGTAACA | 73 | 1773 |
| 1316931 | N/A | N/A | 138040 | 138059 | TTTGAACAATTTCATTCAAC | 77 | 1774 |
| 1316942 | N/A | N/A | 16926 | 16945 | ACAGAAGTTTTTATAAAGTT | 84 | 1775 |
| 1316953 | N/A | N/A | 141280 | 141299 | CCTAGATTCCTTAGAACCAA | 58 | 1776 |
| 1317081 | N/A | N/A | 47187 | 47206 | GCTTGACACACATTTAAAAA | 86 | 1777 |
| 1317091 | N/A | N/A | 2564 | 2583 | CAGAGTACTTCCTAACTCCT | 92 | 1778 |
| 1317104 | N/A | N/A | 81122 | 81141 | TGTAAATATTCCATTTCCAA | 56 | 1779 |
| 1317117 | N/A | N/A | 13346 | 13365 | AGTTCTTATTTTCTCTAGAC | 52 | 1780 |
| 1317205 | N/A | N/A | 64817 | 64836 | GGCACAATCACATTCTGGTA | 19 | 1781 |
| 1317230 | N/A | N/A | 60882 | 60901 | CCCAGAACTTTCAATTGAGC | 76 | 1782 |

TABLE 25
Reduction of HTT RNA by 5-10-5 MOE gapmers with mixed PO/PS internucleoside
linkages in A431 cells

| | SEQ | SEQ | SEQ | SEQ | | | |
|---|---|---|---|---|---|---|---|
| | ID No: | ID No: | ID No: | ID No: | | HTT | SEQ |
| Compound | 1 Start | 1 Stop | 2 Start | 2 Stop | | (% | ID |
| Number | Site | Site | Site | Site | Sequence (5′ to 3′) | UTC) | NO |
| 388241 | 4862 | 4881 | 106917 | 106936 | CTCAGTAACATTGACACCAC | 31 | 858 |
| 1314562 | N/A | N/A | 15211 | 15230 | GTTATTTCATTTTCTTCCCA | 36 | 1783 |
| 1314576 | N/A | N/A | 48774 | 48793 | AGATTAACATTTCCTGCTCA | 76 | 1784 |
| 1314601 | N/A | N/A | 31458 | 31477 | GTTACCATTTTTAATTCTCA | 72 | 1785 |
| 1314642 | N/A | N/A | 109838 | 109857 | ACATCAATATCACATGCCTC | 72 | 1786 |
| 1314644 | N/A | N/A | 110729 | 110748 | GCTATTCTCAACTCAGGAAT | 91 | 1787 |
| 1314661 | N/A | N/A | 77961 | 77980 | CTCAAATCATCATCAGGCAT | 81 | 1788 |
| 1314724 | N/A | N/A | 134908 | 134927 | AACCTTTTTCTTCACAGCTA | 72 | 1789 |
| 1314779 | N/A | N/A | 33554 | 33573 | ACGCAAGTCATTCTTCCAGC | 91 | 1790 |
| 1314823 | N/A | N/A | 98187 | 98206 | TTGTCTTAAAATAATCTGCA | 81 | 1791 |
| 1314834 | N/A | N/A | 59871 | 59890 | GCTCACTTTAACTCTTACCA | 57 | 1792 |
| 1314855 | N/A | N/A | 112728 | 112747 | GCAAACATTTTTACAACAAC | 52 | 1793 |
| 1314940 | N/A | N/A | 115508 | 115527 | ACAAATATTTTCAACTGGCA | 37 | 1794 |
| 1314954 | N/A | N/A | 133541 | 133560 | TGTTTGTAACACCTAACAAC | 98 | 1795 |
| 1314970 | N/A | N/A | 149096 | 149115 | CCTTTTCATTTTAATTCAAC | 90 | 1796 |
| 1314981 | N/A | N/A | 128194 | 128213 | GATACAGCAATTTTATGGCT | 69 | 1797 |
| 1315063 | N/A | N/A | 13345 | 13364 | GTTCTTATTTTCTCTAGACA | 68 | 1798 |
| 1315091 | N/A | N/A | 80782 | 80801 | ACCAAGTTACTTAAATCCTA | 42 | 1799 |
| 1315097 | N/A | N/A | 58808 | 58827 | CTATCAACTTTCTAACTCGA | 80 | 1800 |
| 1315131 | N/A | N/A | 24391 | 24410 | GCTACACTTTTATATTTCCT | 77 | 1801 |
| 1315171 | N/A | N/A | 19174 | 19193 | ATAACTATTCTTCTTTGCCT | 80 | 1802 |
| 1315379 | N/A | N/A | 67686 | 67705 | GCTGAGTTCCTAATTCAGAA | 61 | 1803 |
| 1315413 | N/A | N/A | 6130 | 6149 | GACAGAACCCACCATGCTTA | 76 | 1804 |
| 1315414 | N/A | N/A | 16906 | 16925 | TTTGCATATTTATCGATTCC | 38 | 1805 |
| 1315466 | N/A | N/A | 41082 | 41101 | GGAATACTTTCTCATGGGCC | 72 | 1806 |
| 1315473 | N/A | N/A | 68920 | 68939 | CTGAAAATAAATTTTGATCA | 92 | 1807 |
| 1315482 | N/A | N/A | 70297 | 70316 | GCATCACACTATATACTAGC | 25 | 1808 |
| 1315505 | N/A | N/A | 19883 | 19902 | TCCTGAATTTAATCACATCA | 82 | 1809 |
| 1315534 | N/A | N/A | 44646 | 44665 | TTGCTTTTCCCATCAGACCA | 76 | 1810 |
| 1315546 | N/A | N/A | 117975 | 117994 | ATGATGTAACCATATAATCC | 75 | 1811 |
| 1315644 | N/A | N/A | 107164 | 107183 | ATACACACCAACAACACCTC | 95 | 1812 |
| 1315670 | N/A | N/A | 126796 | 126815 | CAGCTTTTATTTCCATACAT | 40 | 1813 |
| 1315771 | N/A | N/A | 47162 | 47181 | AAACACTATTATGAGTGCCA | 71 | 1814 |
| 1315829 | N/A | N/A | 22931 | 22950 | TCAAATTTCCCTTTTGACTT | 76 | 1815 |
| 1315841 | N/A | N/A | 81121 | 81140 | GTAAATATTCCATTTCCAAT | 66 | 1816 |
| 1315848 | N/A | N/A | 133958 | 133977 | ACCTGATAACCTATTTTCCC | 69 | 1817 |
| 1315901 | N/A | N/A | 143889 | 143908 | CCTATACCATACAATTCTCC | 97 | 1818 |
| 1315944 | N/A | N/A | 26339 | 26358 | CGTGCAGGCACAATTGTCAA | 70 | 1819 |
| 1315952 | N/A | N/A | 100565 | 100584 | ACACACTCACATGCTTATTA | 59 | 1820 |
| 1315960 | 11136 | 11155 | 167885 | 167904 | CCAACATTTCCTCCACTTAC | 67 | 1821 |
| 1315996 | N/A | N/A | 22354 | 22373 | CTTGCATCTAATTCTTGTAA | 82 | 1822 |
| 1316019 | N/A | N/A | 53062 | 53081 | AACCTGTAACACATTTTCCT | 78 | 1823 |
| 1316077 | N/A | N/A | 12322 | 12341 | ACTGACTACAATCAACATAC | 89 | 1824 |
| 1316083 | N/A | N/A | 42627 | 42646 | GCTTCTCTTCCAAATTAATC | 91 | 1825 |
| 1316099 | N/A | N/A | 130251 | 130270 | GCAGTGAGCTTATTTGCAAA | 79 | 1826 |
| 1316115 | N/A | N/A | 122399 | 122418 | GCCACCACTAATCCCATGGT | 93 | 1827 |
| 1316118 | N/A | N/A | 93812 | 93831 | TAGATGATTTTTATTTCAGT | 69 | 1828 |
| 1316191 | N/A | N/A | 34937 | 34956 | TGTTAGCATCATCATACTCA | 61 | 1829 |
| 1316205 | N/A | N/A | 10299 | 10318 | GTATGTATAACCTTTTGGGA | 51 | 1830 |
| 1316214 | N/A | N/A | 141270 | 141289 | TTAGAACCAATTTTAGACAA | 72 | 1831 |
| 1316243 | N/A | N/A | 83245 | 83264 | CAAGTATTTCCTCTGACCTT | 40 | 1832 |
| 1316253 | N/A | N/A | 60881 | 60900 | CCAGAACTTTCAATTGAGCT | 57 | 1833 |
| 1316307 | N/A | N/A | 52690 | 52709 | TCATCTTTTATAAAGTACAC | 85 | 1834 |
| 1316318 | N/A | N/A | 118929 | 118948 | TGCAGCAGACCATCAGTTAC | 101 | 1835 |
| 1316413 | N/A | N/A | 8564 | 8583 | CACCAGCACATTCTACAGCC | 78 | 1836 |
| 1316418 | N/A | N/A | 45977 | 45996 | GGAGATTTCCATTTACATGC | 46 | 1837 |
| 1316464 | N/A | N/A | 45446 | 45465 | ACAGCAATCATCCTAGAATT | 98 | 1838 |
| 1316489 | N/A | N/A | 72052 | 72071 | AGTCACCAAAATCATTCTCA | 64 | 1839 |
| 1316519 | N/A | N/A | 38350 | 38369 | GGTGTCAACAAAACTTCGGA | 63 | 1840 |
| 1316541 | N/A | N/A | 138039 | 138058 | TTGAACAATTTCATTCAACA | 68 | 1841 |
| 1316546 | N/A | N/A | 64257 | 64276 | GTCTACACAAAATCTTGCAG | 50 | 1842 |
| 1316570 | N/A | N/A | 106743 | 106762 | ACTGCTCTCAACATCTACAA | 92 | 1843 |
| 1316613 | N/A | N/A | 17572 | 17591 | CCTCATTTCCCTAATACATA | 77 | 1844 |
| 1316629 | N/A | N/A | 2558 | 2577 | ACTTCCTAACTCCTACTGTA | 80 | 1845 |
| 1316657 | N/A | N/A | 157506 | 157525 | CCACCATGCCATTCTCACCA | 85 | 1846 |
| 1316780 | N/A | N/A | 56350 | 56369 | ACCTGTAGTCCACATACCCA | 77 | 1847 |
| 1316885 | N/A | N/A | 103064 | 103083 | TCAATAAATCTTTATCAGCA | 55 | 1848 |
| 1316887 | N/A | N/A | 72991 | 73010 | GTCACAATACATTTTATACC | 48 | 1849 |
| 1316909 | N/A | N/A | 131314 | 131333 | GAACATCTAACACCTTTTCT | 77 | 1850 |
| 1316922 | N/A | N/A | 4145 | 4164 | TAGTGAATACCTCCTTTCTC | 49 | 1851 |
| 1316937 | N/A | N/A | 34452 | 34471 | TATTCCTTTATTTTACTCTC | 68 | 1852 |
| 1316964 | N/A | N/A | 18225 | 18244 | CCAATATCATTACACACTTT | 54 | 1853 |
| 1316968 | N/A | N/A | 117297 | 117316 | TCCAACAGATCAACTGCTGA | 93 | 1854 |
| 1316979 | N/A | N/A | 104875 | 104894 | AGTACCTTCACATACACAGA | 81 | 1855 |
| 1317074 | N/A | N/A | 73939 | 73958 | TAGCATCAACATTAATCTCC | 70 | 1856 |
| 1317115 | N/A | N/A | 50380 | 50399 | GACGCAAATATTATAGATTC | 29 | 1857 |
| 1317128 | N/A | N/A | 55377 | 55396 | AGGAAGTTCTAACATAGGCT | 27 | 1858 |
| 1317174 | N/A | N/A | 22102 | 22121 | ACCATTTTTATTATTCTAAT | 95 | 1859 |

TABLE 26
Reduction of HTT RNA by 5-10-5 MOE gapmers with mixed PO/PS internucleoside
linkages in A431 cells

| | SEQ | SEQ | SEQ | SEQ | | | |
|---|---|---|---|---|---|---|---|
| | ID No: | ID No: | ID No: | ID No: | | HTT | SEQ |
| Compound | 1 Start | 1 Stop | 2 Start | 2 Stop | | (% | ID |
| Number | Site | Site | Site | Site | Sequence (5′ to 3′) | UTC) | NO |
| 388241 | 4862 | 4881 | 106917 | 106936 | CTCAGTAACATTGACACCAC | 32 | 858 |
| 1314490 | N/A | N/A | 22921 | 22940 | CTTTTGACTTCACTTCTGAC | 83 | 1860 |
| 1314518 | N/A | N/A | 107163 | 107182 | TACACACCAACAACACCTCC | 82 | 1861 |
| 1314531 | N/A | N/A | 112727 | 112746 | CAAACATTTTTACAACAACA | 96 | 1862 |
| 1314552 | N/A | N/A | 18222 | 18241 | ATATCATTACACACTTTCCT | 69 | 1863 |
| 1314555 | N/A | N/A | 33552 | 33571 | GCAAGTCATTCTTCCAGCTC | 113 | 1864 |
| 1314640 | N/A | N/A | 6122 | 6141 | CCACCATGCTTATCTGAGCA | 95 | 1865 |
| 1314662 | N/A | N/A | 19134 | 19153 | CCACTGTTACATATATTTCT | 71 | 1866 |
| 1314693 | N/A | N/A | 133957 | 133976 | CCTGATAACCTATTTTCCCA | 69 | 1867 |
| 1314710 | N/A | N/A | 110701 | 110720 | TCCTGCTAAAACCTACACCA | 94 | 1868 |
| 1314752 | N/A | N/A | 72990 | 73009 | TCACAATACATTTTATACCA | 75 | 1869 |
| 1314821 | N/A | N/A | 71905 | 71924 | CAGTAGTTCCTAAATCATCA | 65 | 1870 |
| 1314863 | N/A | N/A | 157438 | 157457 | GAAATGAGTTTCCATTGCTA | 44 | 1871 |
| 1314888 | N/A | N/A | 50377 | 50396 | GCAAATATTATAGATTCCAA | 26 | 1872 |
| 1314902 | N/A | N/A | 19882 | 19901 | CCTGAATTTAATCACATCAT | 72 | 1873 |
| 1315055 | N/A | N/A | 48749 | 48768 | CTGGCAAACATTTATGTTCA | 49 | 1874 |
| 1315057 | N/A | N/A | 44565 | 44584 | GCATATAGTTTCAATACTTT | 46 | 1875 |
| 1315157 | N/A | N/A | 52689 | 52708 | CATCTTTTATAAAGTACACA | 51 | 1876 |
| 1315194 | N/A | N/A | 47130 | 47149 | TACCAGACATTTTAAAGGCA | 85 | 1877 |
| 1315251 | N/A | N/A | 131313 | 131332 | AACATCTAACACCTTTTCTA | 90 | 1878 |
| 1315272 | N/A | N/A | 102989 | 103008 | CTGTACTGAATCTTAAGAAC | 89 | 1879 |
| 1315285 | N/A | N/A | 68907 | 68926 | TTGATCATTATTCCATAACA | 81 | 1880 |
| 1315380 | N/A | N/A | 8563 | 8582 | ACCAGCACATTCTACAGCCA | 68 | 1881 |
| 1315401 | N/A | N/A | 149095 | 149114 | CTTTTCATTTTAATTCAACC | 98 | 1882 |
| 1315476 | N/A | N/A | 24386 | 24405 | ACTTTTATATTTCCTAGCTG | 94 | 1883 |
| 1315486 | N/A | N/A | 70296 | 70315 | CATCACACTATATACTAGCA | 57 | 1884 |
| 1315539 | N/A | N/A | 31454 | 31473 | CCATTTTTAATTCTCATCTC | 102 | 1885 |
| 1315558 | N/A | N/A | 98130 | 98149 | ACAAGCATTTTTATCAACAT | 54 | 1886 |
| 1315569 | N/A | N/A | 45442 | 45461 | CAATCATCCTAGAATTGCTT | 107 | 1887 |
| 1315624 | N/A | N/A | 133540 | 133559 | GTTTGTAACACCTAACAACC | 86 | 1888 |
| 1315675 | N/A | N/A | 4144 | 4163 | AGTGAATACCTCCTTTCTCA | 49 | 1889 |
| 1315697 | N/A | N/A | 93811 | 93830 | AGATGATTTTTATTTCAGTA | 68 | 1890 |
| 1315735 | N/A | N/A | 134904 | 134923 | TTTTTCTTCACAGCTATCTT | 94 | 1891 |
| 1315781 | N/A | N/A | 55126 | 55145 | AATGTATTTAATACCAGCGA | 24 | 1892 |
| 1315788 | N/A | N/A | 26266 | 26285 | GCATCTCCAAACCATACAAT | 77 | 1893 |
| 1315803 | N/A | N/A | 83107 | 83126 | GCTTTGTGAGAAATCAGTTA | 34 | 1894 |
| 1315821 | N/A | N/A | 2555 | 2574 | TCCTAACTCCTACTGTACAC | 92 | 1895 |
| 1315852 | N/A | N/A | 128125 | 128144 | TCTAGTAATTCATTTTTCTC | 66 | 1896 |
| 1315959 | N/A | N/A | 22070 | 22089 | TTCATTAGCTATAATTCCTT | 93 | 1897 |
| 1315966 | N/A | N/A | 58806 | 58825 | ATCAACTTTCTAACTCGAAA | 85 | 1898 |
| 1316001 | N/A | N/A | 118881 | 118900 | AGACCAGCCCCACCTCCTCA | 86 | 1899 |
| 1316067 | N/A | N/A | 16841 | 16860 | GTTATATTTTCTAGCTGATT | 53 | 1900 |
| 1316107 | N/A | N/A | 117974 | 117993 | TGATGTAACCATATAATCCC | 83 | 1901 |
| 1316123 | N/A | N/A | 53061 | 53080 | ACCTGTAACACATTTTCCTA | 88 | 1902 |
| 1316224 | N/A | N/A | 80778 | 80797 | AGTTACTTAAATCCTATGTT | 74 | 1903 |
| 1316241 | N/A | N/A | 15207 | 15226 | TTTCATTTTCTTCCCACAAC | 99 | 1904 |
| 1316258 | N/A | N/A | 100559 | 100578 | TCACATGCTTATTAATACCC | 93 | 1905 |
| 1316264 | N/A | N/A | 56349 | 56368 | CCTGTAGTCCACATACCCAT | 90 | 1906 |
| 1316323 | N/A | N/A | 130244 | 130263 | GCTTATTTGCAAAATACTGA | 57 | 1907 |
| 1316324 | N/A | N/A | 117258 | 117277 | GTTTGCCTCATATTTGGACC | 32 | 1908 |
| 1316326 | N/A | N/A | 106741 | 106760 | TGCTCTCAACATCTACAAAA | 86 | 1909 |
| 1316344 | N/A | N/A | 34449 | 34468 | TCCTTTATTTTACTCTCAGA | 58 | 1910 |
| 1316396 | N/A | N/A | 64229 | 64248 | TCACAGTACCATAATTCATA | 36 | 1911 |
| 1316415 | N/A | N/A | 22333 | 22352 | CACAGTGAACTTCTTTCCGT | 77 | 1912 |
| 1316417 | N/A | N/A | 12320 | 12339 | TGACTACAATCAACATACCA | 72 | 1913 |
| 1316565 | N/A | N/A | 34936 | 34955 | GTTAGCATCATCATACTCAA | 48 | 1914 |
| 1316568 | N/A | N/A | 81114 | 81133 | TTCCATTTCCAATCAGAATT | 77 | 1915 |
| 1316585 | 11132 | 11151 | 167881 | 167900 | CATTTCCTCCACTTACCACA | 92 | 1916 |
| 1316601 | N/A | N/A | 115507 | 115526 | CAAATATTTTCAACTGGCAC | 54 | 1917 |
| 1316634 | N/A | N/A | 17547 | 17566 | TACACCCATCATAAATTCAT | 93 | 1918 |
| 1316654 | N/A | N/A | 59860 | 59879 | CTCTTACCATACTATGGGCC | 93 | 1919 |
| 1316713 | N/A | N/A | 41024 | 41043 | TGATGGCCATTTAAATCTTG | 95 | 1920 |
| 1316718 | N/A | N/A | 73938 | 73957 | AGCATCAACATTAATCTCCT | 67 | 1921 |
| 1316729 | N/A | N/A | 10278 | 10297 | TGGCTTTTTTCATTAGCATA | 54 | 1922 |
| 1316774 | N/A | N/A | 122319 | 122338 | CTGTTTTTATCCTCACAGAA | 105 | 1923 |
| 1316800 | N/A | N/A | 77713 | 77732 | GGCACTCTCCTTTCTCCCTC | 69 | 1924 |
| 1316809 | N/A | N/A | 143883 | 143902 | CCATACAATTCTCCCCATTT | 68 | 1925 |
| 1316854 | N/A | N/A | 45884 | 45903 | AGTATGTATCTTACACATCA | 75 | 1926 |
| 1316938 | 442 | 461 | 13271 | 13290 | GACAATGATTCACACGGTCT | 46 | 1927 |
| 1316973 | N/A | N/A | 42624 | 42643 | TCTCTTCCAAATTAATCGGT | 104 | 1928 |
| 1317001 | N/A | N/A | 104874 | 104893 | GTACCTTCACATACACAGAC | 74 | 1929 |
| 1317058 | N/A | N/A | 109830 | 109849 | ATCACATGCCTCTAAGTTTA | 79 | 1930 |
| 1317061 | N/A | N/A | 67659 | 67678 | ATCAAGTGATCATTTAAGCT | 27 | 1931 |
| 1317111 | N/A | N/A | 60880 | 60899 | CAGAACTTTCAATTGAGCTT | 73 | 1932 |
| 1317163 | N/A | N/A | 126795 | 126814 | AGCTTTTATTTCCATACATA | 32 | 1933 |
| 1317190 | N/A | N/A | 141233 | 141252 | GAGGTACCAATCTCTTGGTT | 55 | 1934 |
| 1317211 | N/A | N/A | 37845 | 37864 | GAGTAATTTCCTTCCAGGGA | 53 | 1935 |
| 1317219 | N/A | N/A | 138016 | 138035 | GCTTAGTAAAATATATATCT | 76 | 1936 |

TABLE 27
Reduction of HTT RNA by 5-10-5 MOE gapmers with mixed PO/PS internucleoside
linkages in A431 cells

| | SEQ | SEQ | SEQ | SEQ | | | |
|---|---|---|---|---|---|---|---|
| | ID No: | ID No: | ID No: | ID No: | | HTT | SEQ |
| Compound | 1 Start | 1 Stop | 2 Start | 2 Stop | | (% | ID |
| Number | Site | Site | Site | Site | Sequence (5′ to 3′) | UTC) | NO |
| 388241 | 4862 | 4881 | 106917 | 106936 | CTCAGTAACATTGACACCAC | 35 | 858 |
| 1314503 | N/A | N/A | 45374 | 45393 | CCTCTATTTTTCAATTTATT | 97 | 1937 |
| 1314508 | N/A | N/A | 10272 | 10291 | TTTTCATTAGCATAACTTCA | 69 | 1938 |
| 1314514 | N/A | N/A | 15206 | 15225 | TTCATTTTCTTCCCACAACA | 95 | 1939 |
| 1314523 | N/A | N/A | 83030 | 83049 | GCCTAAGATTCCTTAGTGGC | 114 | 1940 |
| 1314574 | N/A | N/A | 12319 | 12338 | GACTACAATCAACATACCAC | 88 | 1941 |
| 1314620 | N/A | N/A | 117243 | 117262 | GGACCATGACTTAATGCTGT | 39 | 1942 |
| 1314633 | N/A | N/A | 45816 | 45835 | ACAAATGTTATTCACTGCAA | 53 | 1943 |
| 1314636 | N/A | N/A | 22018 | 22037 | ACTATGTATCTTCATCACAA | 64 | 1944 |
| 1314650 | 433 | 452 | 13262 | 13281 | TCACACGGTCTTTCTTGGTA | 31 | 1945 |
| 1314672 | N/A | N/A | 107160 | 107179 | ACACCAACAACACCTCCTGC | 98 | 1946 |
| 1314685 | N/A | N/A | 130188 | 130207 | AGTTGTTTTAAATATTGCCA | 25 | 1947 |
| 1314694 | N/A | N/A | 133953 | 133972 | ATAACCTATTTTCCCACTCA | 77 | 1948 |
| 1314735 | N/A | N/A | 2298 | 2317 | GTACACCTCATTCATCCCTC | 46 | 1949 |
| 1314744 | N/A | N/A | 137926 | 137945 | GGTATGACAATTTTAATTCA | 33 | 1950 |
| 1314826 | N/A | N/A | 34447 | 34466 | CTTTATTTTACTCTCAGAGT | 94 | 1951 |
| 1314850 | N/A | N/A | 106740 | 106759 | GCTCTCAACATCTACAAAAT | 88 | 1952 |
| 1314901 | N/A | N/A | 70295 | 70314 | ATCACACTATATACTAGCAT | 53 | 1953 |
| 1314933 | N/A | N/A | 52672 | 52691 | ACAGAGAATTTCATTAGATA | 75 | 1954 |
| 1314937 | N/A | N/A | 80767 | 80786 | TCCTATGTTTCTACATGACA | 90 | 1955 |
| 1314939 | N/A | N/A | 104859 | 104878 | CAGACACACATGCAGAGCCT | 89 | 1956 |
| 1314951 | N/A | N/A | 6043 | 6062 | AGCCAGAGTTCACTTAAGAT | 71 | 1957 |
| 1314987 | N/A | N/A | 22919 | 22938 | TTTGACTTCACTTCTGACCC | 92 | 1958 |
| 1315068 | N/A | N/A | 72988 | 73007 | ACAATACATTTTATACCAGC | 54 | 1959 |
| 1315105 | N/A | N/A | 112716 | 112735 | ACAACAACACTGTATAGCTA | 96 | 1960 |
| 1315142 | N/A | N/A | 8562 | 8581 | CCAGCACATTCTACAGCCAC | 77 | 1961 |
| 1315160 | N/A | N/A | 19133 | 19152 | CACTGTTACATATATTTCTT | 72 | 1962 |
| 1315193 | N/A | N/A | 117973 | 117992 | GATGTAACCATATAATCCCA | 54 | 1963 |
| 1315241 | N/A | N/A | 33547 | 33566 | TCATTCTTCCAGCTCTCCTT | 106 | 1964 |
| 1315269 | N/A | N/A | 44497 | 44516 | CAGATATAAAATATACACTA | 103 | 1965 |
| 1315304 | N/A | N/A | 131312 | 131331 | ACATCTAACACCTTTTCTAC | 92 | 1966 |
| 1315399 | N/A | N/A | 47129 | 47148 | ACCAGACATTTTAAAGGCAG | 95 | 1967 |
| 1315442 | N/A | N/A | 53057 | 53076 | GTAACACATTTTCCTAGTTG | 54 | 1968 |
| 1315445 | N/A | N/A | 128119 | 128138 | AATTCATTTTTCTCATCTCA | 42 | 1969 |
| 1315446 | N/A | N/A | 58739 | 58758 | TCCAAATTCAGAAATGACTT | 84 | 1970 |
| 1315447 | N/A | N/A | 115478 | 115497 | GGCAGAGTTTCTACCGGGCA | 36 | 1971 |
| 1315617 | N/A | N/A | 19881 | 19900 | CTGAATTTAATCACATCATA | 94 | 1972 |
| 1315642 | N/A | N/A | 59579 | 59598 | GCCCATAGTCTTGAACTCCT | 67 | 1973 |
| 1315686 | N/A | N/A | 81081 | 81100 | AATCAGTTTTTTCACTCACT | 46 | 1974 |
| 1315742 | N/A | N/A | 37844 | 37863 | AGTAATTTCCTTCCAGGGAT | 90 | 1975 |
| 1315886 | N/A | N/A | 60864 | 60883 | GCTTAGTTCATGAAATCTAA | 34 | 1976 |
| 1315923 | N/A | N/A | 143387 | 143406 | AGAAGGACTTCTCATTGGAC | 47 | 1977 |
| 1315933 | 1974 | 1993 | 56308 | 56327 | CGAGGCTTCATCAGGAAGAA | 77 | 1978 |
| 1315946 | N/A | N/A | 141189 | 141208 | ACTTCAGATTTCATTCAGAT | 80 | 1979 |
| 1315957 | N/A | N/A | 118805 | 118824 | GTTTATGGTCACCCATATTA | 106 | 1980 |
| 1315986 | N/A | N/A | 17546 | 17565 | ACACCCATCATAAATTCATA | 115 | 1981 |
| 1316002 | N/A | N/A | 110696 | 110715 | CTAAAACCTACACCACATCA | 108 | 1982 |
| 1316090 | N/A | N/A | 22332 | 22351 | ACAGTGAACTTCTTTCCGTT | 74 | 1983 |
| 1316196 | N/A | N/A | 73934 | 73953 | TCAACATTAATCTCCTGAGT | 97 | 1984 |
| 1316270 | N/A | N/A | 41021 | 41040 | TGGCCATTTAAATCTTGATA | 97 | 1985 |
| 1316281 | N/A | N/A | 93765 | 93784 | ATAGTATTTTCCATTTTGCT | 64 | 1986 |
| 1316310 | N/A | N/A | 126794 | 126813 | GCTTTTATTTCCATACATAT | 34 | 1987 |
| 1316357 | N/A | N/A | 156630 | 156649 | GTAGCATTTCCACCATCTAC | 112 | 1988 |
| 1316431 | N/A | N/A | 149093 | 149112 | TTTCATTTTAATTCAACCTA | 119 | 1989 |
| 1316433 | N/A | N/A | 109708 | 109727 | GGCAACCTCAAGCTGTGCCA | 96 | 1990 |
| 1316515 | N/A | N/A | 42623 | 42642 | CTCTTCCAAATTAATCGGTT | 91 | 1991 |
| 1316579 | N/A | N/A | 18221 | 18240 | TATCATTACACACTTTCCTA | 84 | 1992 |
| 1316625 | N/A | N/A | 98129 | 98148 | CAAGCATTTTTATCAACATC | 95 | 1993 |
| 1316758 | N/A | N/A | 4138 | 4157 | TACCTCCTTTCTCAACAGCA | 55 | 1994 |
| 1316771 | 11128 | 11147 | 167877 | 167896 | TCCTCCACTTACCACATTCA | 95 | 1995 |
| 1316785 | N/A | N/A | 64198 | 64217 | ACATGAACTCTATAATATCC | 79 | 1996 |
| 1316796 | N/A | N/A | 133538 | 133557 | TTGTAACACCTAACAACCCA | 109 | 1997 |
| 1316833 | N/A | N/A | 34871 | 34890 | ATACCATCTATCATCTGAGC | 95 | 1998 |
| 1316874 | N/A | N/A | 16607 | 16626 | TTAACAAATTTTCCAGATGA | 102 | 1999 |
| 1316880 | N/A | N/A | 134899 | 134918 | CTTCACAGCTATCTTCTCAT | 76 | 2000 |
| 1316881 | N/A | N/A | 100557 | 100576 | ACATGCTTATTAATACCCCA | 47 | 2001 |
| 1316886 | N/A | N/A | 121393 | 121412 | GCTACACTCACCACTATCAA | 100 | 2002 |
| 1316889 | N/A | N/A | 50338 | 50357 | ACTTAATTCAATGAAGGCTA | 46 | 2003 |
| 1316905 | N/A | N/A | 67657 | 67676 | CAAGTGATCATTTAAGCTTA | 73 | 2004 |
| 1316943 | N/A | N/A | 24238 | 24257 | GTATATCTCAATTCAGACAC | 73 | 2005 |
| 1316946 | N/A | N/A | 71903 | 71922 | GTAGTTCCTAAATCATCACC | 68 | 2006 |
| 1316952 | N/A | N/A | 102912 | 102931 | GTCTTTGTTCTTACTAGAAT | 73 | 2007 |
| 1316959 | N/A | N/A | 48722 | 48741 | CAGCAGTAAGACTTCAGTCA | 56 | 2008 |
| 1317005 | N/A | N/A | 77686 | 77705 | CCTCTCAATCTTTCTTTTTC | 106 | 2009 |
| 1317010 | N/A | N/A | 31384 | 31403 | ACAGCATTTCCTTCTAACAT | 87 | 2010 |
| 1317112 | N/A | N/A | 68888 | 68907 | AATGGCTGAATTTATTCCCT | 49 | 2011 |
| 1317167 | N/A | N/A | 26106 | 26125 | TGCAAACCATACAATAGAGC | 95 | 2012 |
| 1317227 | N/A | N/A | 55125 | 55144 | ATGTATTTAATACCAGCGAA | 29 | 2013 |

TABLE 28
Reduction of HTT RNA by 5-10-5 MOE gapmers with mixed PO/PS internucleoside
linkages in A431 cells

| | SEQ | SEQ | SEQ | SEQ | | | |
|---|---|---|---|---|---|---|---|
| | ID No: | ID No: | ID No: | ID No: | | HTT | SEQ |
| Compound | 1 Start | 1 Stop | 2 Start | 2 Stop | | (% | ID |
| Number | Site | Site | Site | Site | Sequence (5′ to 3′) | UTC) | NO |
| 388241 | 4862 | 4881 | 106917 | 106936 | CTCAGTAACATTGACACCAC | 24 | 858 |
| 1314502 | N/A | N/A | 110691 | 110710 | ACCTACACCACATCAGCGCA | 100 | 2014 |
| 1314542 | 1963 | 1982 | 56297 | 56316 | CAGGAAGAATACCTGTGGCT | 46 | 2015 |
| 1314548 | N/A | N/A | 55067 | 55086 | GTTACACATATTTAACCACA | 19 | 2016 |
| 1314553 | N/A | N/A | 52296 | 52315 | TTCAAGTTAAACTATCCATA | 82 | 2017 |
| 1314605 | N/A | N/A | 13241 | 13260 | CTGAAAGTTCTTTCTTTCTA | 94 | 2018 |
| 1314621 | N/A | N/A | 2294 | 2313 | ACCTCATTCATCCCTCGGCA | 49 | 2019 |
| 1314663 | N/A | N/A | 22882 | 22901 | GGGTTTTTCCACATATCTGA | 60 | 2020 |
| 1314698 | N/A | N/A | 25930 | 25949 | TCCAAACCATACAAGAGCAC | 84 | 2021 |
| | | | 25951 | 25970 | | | |
| | | | 26062 | 26081 | | | |
| | | | 26083 | 26102 | | | |
| | | | 26150 | 26169 | | | |
| | | | 26171 | 26190 | | | |
| | | | 26238 | 26257 | | | |
| 1314704 | N/A | N/A | 106736 | 106755 | TCAACATCTACAAAATGCTT | 92 | 2022 |
| 1314795 | N/A | N/A | 149092 | 149111 | TTCATTTTAATTCAACCTAC | 85 | 2023 |
| 1314801 | N/A | N/A | 134897 | 134916 | TCACAGCTATCTTCTCATCA | 63 | 2024 |
| 1314964 | N/A | N/A | 72986 | 73005 | AATACATTTTATACCAGCTC | 30 | 2025 |
| 1314980 | N/A | N/A | 15205 | 15224 | TCATTTTCTTCCCACAACAT | 93 | 2026 |
| 1314986 | N/A | N/A | 22014 | 22033 | TGTATCTTCATCACAATCTA | 69 | 2027 |
| 1315003 | N/A | N/A | 127983 | 128002 | GATTTATTTTTTCCTTCCAC | 46 | 2028 |
| 1315090 | N/A | N/A | 53042 | 53061 | AGTTGACTTTCTAAATTACC | 76 | 2029 |
| 1315107 | N/A | N/A | 117970 | 117989 | GTAACCATATAATCCCAACA | 36 | 2030 |
| 1315177 | N/A | N/A | 117197 | 117216 | CTTTCTATTTTCTTGAGAGA | 85 | 2031 |
| 1315277 | N/A | N/A | 98128 | 98147 | AAGCATTTTTATCAACATCT | 52 | 2032 |
| 1315283 | N/A | N/A | 68886 | 68905 | TGGCTGAATTTATTCCCTCC | 61 | 2033 |
| 1315305 | N/A | N/A | 58723 | 58742 | ACTTCACTATAATAACCCTA | 66 | 2034 |
| 1315321 | N/A | N/A | 130187 | 130206 | GTTGTTTTAAATATTGCCAT | 11 | 2035 |
| 1315385 | N/A | N/A | 6029 | 6048 | TAAGATTGAAATTCAGATCA | 77 | 2036 |
| 1315392 | N/A | N/A | 34421 | 34440 | ATATGGGTCCCATTAAGGCT | 53 | 2037 |
| 1315420 | N/A | N/A | 100455 | 100474 | CATGGGTATTTTCCTTGACT | 63 | 2038 |
| 1315424 | N/A | N/A | 12318 | 12337 | ACTACAATCAACATACCACA | 101 | 2039 |
| 1315529 | N/A | N/A | 17542 | 17561 | CCATCATAAATTCATACAGA | 76 | 2040 |
| 1315575 | N/A | N/A | 19132 | 19151 | ACTGTTACATATATTTCTTC | 49 | 2041 |
| 1315636 | N/A | N/A | 48604 | 48623 | GCAGAAGTTTATCCATAGCC | 29 | 2042 |
| 1315661 | N/A | N/A | 30256 | 30275 | ATATACATTTACATGTACCT | 112 | 2043 |
| 1315691 | N/A | N/A | 50287 | 50306 | ACTGCAAATAATATTAGGCA | 34 | 2044 |
| 1315727 | N/A | N/A | 19870 | 19889 | CACATCATAAAACAATTTTC | 79 | 2045 |
| 1315814 | N/A | N/A | 81079 | 81098 | TCAGTTTTTTCACTCACTAC | 41 | 2046 |
| 1315869 | N/A | N/A | 156305 | 156324 | CCTGTCACTTACCATCCCAA | 78 | 2047 |
| 1315906 | N/A | N/A | 37202 | 37221 | CCAACATCCAACTAACCAAT | 82 | 2048 |
| 1315909 | N/A | N/A | 112707 | 112726 | CTGTATAGCTACATTTTTCC | 68 | 2049 |
| 1315921 | N/A | N/A | 67642 | 67661 | GCTTAGAAGTCATTTAGTCC | 6 | 2050 |
| 1316004 | N/A | N/A | 16585 | 16604 | TTGATGCTCATCCATACTTA | 73 | 2051 |
| 1316021 | N/A | N/A | 93764 | 93783 | TAGTATTTTCCATTTTGCTA | 77 | 2052 |
| 1316047 | N/A | N/A | 22306 | 22325 | CCTGTAGGTTATTTTTGCCT | 56 | 2053 |
| 1316078 | N/A | N/A | 33539 | 33558 | CCAGCTCTCCTTCAGGAGAA | 93 | 2054 |
| 1316121 | N/A | N/A | 64192 | 64211 | ACTCTATAATATCCATCTGA | 63 | 2055 |
| 1316145 | N/A | N/A | 70279 | 70298 | GCATATGTACATAATTTAAT | 72 | 2056 |
| 1316171 | N/A | N/A | 131308 | 131327 | CTAACACCTTTTCTACAAAT | 79 | 2057 |
| 1316186 | N/A | N/A | 47128 | 47147 | CCAGACATTTTAAAGGCAGT | 61 | 2058 |
| 1316372 | N/A | N/A | 77684 | 77703 | TCTCAATCTTTCTTTTTCTC | 86 | 2059 |
| 1316461 | N/A | N/A | 107158 | 107177 | ACCAACAACACCTCCTGCCA | 91 | 2060 |
| 1316584 | N/A | N/A | 18171 | 18190 | GGTCAGACATATAATAATCT | 45 | 2061 |
| 1316606 | N/A | N/A | 83029 | 83048 | CCTAAGATTCCTTAGTGGCC | 72 | 2062 |
| 1316607 | N/A | N/A | 44472 | 44491 | GACAAGGCTTTTCCTCCAAT | 38 | 2063 |
| 1316637 | N/A | N/A | 141147 | 141166 | CTGTTGGCCATCTCTCACCC | 89 | 2064 |
| 1316662 | N/A | N/A | 115458 | 115477 | GCACAGCTCCTACACTCTGA | 60 | 2065 |
| 1316666 | N/A | N/A | 34870 | 34889 | TACCATCTATCATCTGAGCT | 81 | 2066 |
| 1316686 | N/A | N/A | 24225 | 24244 | CAGACACTAAATTTTCATCA | 57 | 2067 |
| 1316694 | N/A | N/A | 133537 | 133556 | TGTAACACCTAACAACCCAA | 87 | 2068 |
| 1316720 | N/A | N/A | 143372 | 143391 | TGGACTTAAGCAATTAAGCC | 84 | 2069 |
| 1316721 | N/A | N/A | 109548 | 109567 | GCCAGGCCATTTCCTTCCAC | 81 | 2070 |
| 1316778 | N/A | N/A | 4051 | 4070 | TGCAGTTGATTTCAGAGCAT | 64 | 2071 |
| 1316791 | N/A | N/A | 121302 | 121321 | GGCACAGGATCTTTTAGAAC | 33 | 2072 |
| 1316823 | N/A | N/A | 42593 | 42612 | CAGTCATTCACATGCAGGGC | 33 | 2073 |
| 1316836 | N/A | N/A | 80718 | 80737 | ACGCTGTTTCCTACCTGCAC | 95 | 2074 |
| 1316919 | N/A | N/A | 45371 | 45390 | CTATTTTTCAATTTATTCCT | 92 | 2075 |
| 1316935 | N/A | N/A | 45777 | 45796 | GAGTCCAGTCACAATAACCT | 97 | 2076 |
| 1316978 | N/A | N/A | 118800 | 118819 | TGGTCACCCATATTACTCAT | 37 | 2077 |
| 1316996 | N/A | N/A | 126780 | 126799 | ACATATACAAATAATGGAGT | 40 | 2078 |
| 1317023 | N/A | N/A | 137925 | 137944 | GTATGACAATTTTAATTCAT | 56 | 2079 |
| 1317037 | N/A | N/A | 73882 | 73901 | TTGGATGAATGATCTTATTA | 71 | 2080 |
| 1317100 | 11122 | 11141 | 167871 | 167890 | ACTTACCACATTCAATACCC | 84 | 2081 |
| 1317106 | N/A | N/A | 133952 | 133971 | TAACCTATTTTCCCACTCAT | 97 | 2082 |
| 1317121 | N/A | N/A | 102713 | 102732 | TAGACGGATTTTCTTCGGAC | 39 | 2083 |
| 1317140 | N/A | N/A | 60844 | 60863 | TGGATGTGACTCACTTACCT | 111† | 2084 |
| 1317141 | N/A | N/A | 10243 | 10262 | TTGCATGCTATCAGTAGCTC | 44 | 2085 |
| 1317148 | N/A | N/A | 59495 | 59514 | GCCCAGCATATTCAACAGAC | 89 | 2086 |
| 1317172 | N/A | N/A | 104782 | 104801 | GCCAAGCACATCACGACACC | 63 | 2087 |
| 1317180 | N/A | N/A | 71902 | 71921 | TAGTTCCTAAATCATCACCA | 58 | 2088 |
| 1317198 | N/A | N/A | 41019 | 41038 | GCCATTTAAATCTTGATAAA | 99 | 2089 |
| 1317206 | N/A | N/A | 8488 | 8507 | TTCTAAAATATTACATAGCA | 100 | 2090 |

TABLE 29
Reduction of HTT RNA by 5-10-5 MOE gapmers with mixed PO/PS internucleoside
linkages in A431 cells

| | SEQ | SEQ | SEQ | SEQ | | | |
|---|---|---|---|---|---|---|---|
| | ID No: | ID No: | ID No: | ID No: | | HTT | SEQ |
| Compound | 1 Start | 1 Stop | 2 Start | 2 Stop | | (% | ID |
| Number | Site | Site | Site | Site | Sequence (5′ to 3′) | UTC) | NO |
| 388241 | 4862 | 4881 | 106917 | 106936 | CTCAGTAACATTGACACCAC | 27 | 858 |
| 1314527 | N/A | N/A | 34404 | 34423 | GCTTATTTTTCAGAATACGA | 41 | 2091 |
| 1314570 | N/A | N/A | 19128 | 19147 | TTACATATATTTCTTCCGTT | 32 | 2092 |
| 1314797 | N/A | N/A | 26052 | 26071 | ACAAGAGCACTTCCAAACCA | 85 | 2093 |
| | | | 26140 | 26159 | | | |
| 1314806 | N/A | N/A | 142925 | 142944 | AAGCATAATCATCTTCACCC | 41 | 2094 |
| 1314824 | N/A | N/A | 48603 | 48622 | CAGAAGTTTATCCATAGCCT | 26 | 2095 |
| 1314841 | N/A | N/A | 10209 | 10228 | CTGAGTAGTTTAACCATTCA | 59 | 2096 |
| 1314872 | 2750 | 2769 | 60811 | 60830 | GCAAGGGTTTCCAGAAGCTC | 731 | 2097 |
| 1314919 | N/A | N/A | 45776 | 45795 | AGTCCAGTCACAATAACCTA | 104 | 2098 |
| 1314982 | N/A | N/A | 126685 | 126704 | GTAAGCCTTTTTGAATGGTA | 30 | 2099 |
| 1314983 | N/A | N/A | 77634 | 77653 | TCTCTCTTTTTCCTGTGGGC | 55 | 2100 |
| 1315011 | N/A | N/A | 72985 | 73004 | ATACATTTTATACCAGCTCA | 41 | 2101 |
| 1315025 | N/A | N/A | 137869 | 137888 | TCAGTGATACACCAACCACC | 74 | 2102 |
| 1315075 | N/A | N/A | 33519 | 33538 | ACAGAAGCAATTCATTCCCT | 84 | 2103 |
| 1315088 | N/A | N/A | 81077 | 81096 | AGTTTTTTCACTCACTACAT | 62 | 2104 |
| 1315176 | 4740 | 4759 | 104727 | 104746 | TGTCACAGCCTTCCTTCCAC | 69 | 2105 |
| 1315179 | N/A | N/A | 6024 | 6043 | TTGAAATTCAGATCATGCTA | 60 | 2106 |
| 1315188 | N/A | N/A | 83013 | 83032 | GGCCAACAACTTCATGAGCA | 86 | 2107 |
| 1315190 | 1947 | 1966 | 56281 | 56300 | GGCTTCCTCATCTTCATCCT | 49 | 2108 |
| 1315234 | 666 | 685 | N/A | N/A | ACCATTCTTTTTAATTTCCT | 27 | 2109 |
| 1315278 | N/A | N/A | 19869 | 19888 | ACATCATAAAACAATTTTCC | 74 | 2110 |
| 1315301 | N/A | N/A | 68884 | 68903 | GCTGAATTTATTCCCTCCCT | 55 | 2111 |
| 1315320 | N/A | N/A | 112705 | 112724 | GTATAGCTACATTTTTCCCA | 69 | 2112 |
| 1315324 | N/A | N/A | 133950 | 133969 | ACCTATTTTCCCACTCATCA | 83 | 2113 |
| 1315325 | 3703 | 3722 | 80650 | 80669 | CTGGTTCTTTCTCCTTCCCC | 51 | 2114 |
| 1315403 | N/A | N/A | 58666 | 58685 | TAGAGATTCATCATATTGCC | 43 | 2115 |
| 1315429 | N/A | N/A | 107157 | 107176 | CCAACAACACCTCCTGCCAC | 68 | 2116 |
| 1315493 | 1212 | 1231 | N/A | N/A | CAGTTCATAAACCTGGACAA | 63 | 2117 |
| 1315583 | N/A | N/A | 34869 | 34888 | ACCATCTATCATCTGAGCTC | 107 | 2118 |
| 1315660 | N/A | N/A | 22261 | 22280 | GGCAGCAGCATATACCGAGT | 53 | 2119 |
| 1315693 | N/A | N/A | 15200 | 15219 | TTCTTCCCACAACATTTCCA | 68 | 2120 |
| 1315711 | N/A | N/A | 24156 | 24175 | CGTATACCATTTCCAACCAC | 60 | 2121 |
| 1315725 | N/A | N/A | 47110 | 47129 | GTATGCCATATTTATTAGCA | 80 | 2122 |
| 1315741 | N/A | N/A | 59493 | 59512 | CCAGCATATTCAACAGACTT | 67 | 2123 |
| 1315831 | N/A | N/A | 13194 | 13213 | TGTGTTGAATTACCCACTCC | 92 | 2124 |
| 1315864 | N/A | N/A | 121270 | 121289 | CGGGAAATACTTCACAGAGC | 48 | 2125 |
| 1315870 | N/A | N/A | 45314 | 45333 | TGCATATCTAAAATTATCAA | 88 | 2126 |
| 1315877 | N/A | N/A | 54999 | 55018 | GTAGCAAACATTATTAGACT | 17 | 2127 |
| 1315927 | N/A | N/A | 52293 | 52312 | AAGTTAAACTATCCATAGGC | 68 | 2128 |
| 1315989 | N/A | N/A | 127982 | 128001 | ATTTATTTTTTCCTTCCACC | 43 | 2129 |
| 1316005 | N/A | N/A | 18169 | 18188 | TCAGACATATAATAATCTAA | 76 | 2130 |
| 1316031 | N/A | N/A | 149091 | 149110 | TCATTTTAATTCAACCTACA | 111 | 2131 |
| 1316060 | N/A | N/A | 87154 | 87173 | GAGACTTTTAACTCAGGCTC | 68 | 2132 |
| 1316087 | N/A | N/A | 71901 | 71920 | AGTTCCTAAATCATCACCAT | 69 | 2133 |
| 1316093 | N/A | N/A | 134895 | 134914 | ACAGCTATCTTCTCATCAAT | 72 | 2134 |
| 1316098 | N/A | N/A | 16582 | 16601 | ATGCTCATCCATACTTAGGA | 33 | 2135 |
| 1316120 | N/A | N/A | 22879 | 22898 | TTTTTCCACATATCTGAGGC | 76 | 2136 |
| 1316155 | N/A | N/A | 102145 | 102164 | GTAATATTTCTAACTCACAA | 68 | 2137 |
| 1316176 | N/A | N/A | 64128 | 64147 | GCCAATAAAAATGAACAAAC | 78 | 2138 |
| 1316216 | N/A | N/A | 44471 | 44490 | ACAAGGCTTTTCCTCCAATT | 64 | 2139 |
| 1316219 | N/A | N/A | 98127 | 98146 | AGCATTTTTATCAACATCTA | 67 | 2140 |
| 1316292 | 11121 | 11140 | 167870 | 167889 | CTTACCACATTCAATACCCA | 109 | 2141 |
| 1316333 | N/A | N/A | 22010 | 22029 | TCTTCATCACAATCTACCTT | 74 | 2142 |
| 1316336 | N/A | N/A | 50286 | 50305 | CTGCAAATAATATTAGGCAT | 50 | 2143 |
| 1316377 | N/A | N/A | 41009 | 41028 | TCTTGATAAAAATATCCTAA | 93 | 2144 |
| 1316401 | 8300 | 8319 | 156196 | 156215 | GTCACATACATCAGCTCAAA | 48 | 2145 |
| 1316404 | N/A | N/A | 73872 | 73891 | GATCTTATTAAAATACTCAT | 66 | 2146 |
| 1316483 | N/A | N/A | 133536 | 133555 | GTAACACCTAACAACCCAAA | 86 | 2147 |
| 1316510 | N/A | N/A | 110690 | 110709 | CCTACACCACATCAGCGCAA | 89 | 2148 |
| 1316516 | N/A | N/A | 117149 | 117168 | GGCTTCTAGCTATTTAGTCA | 76 | 2149 |
| 1316518 | N/A | N/A | 70274 | 70293 | TGTACATAATTTAATTATTC | 100 | 2150 |
| 1316551 | N/A | N/A | 67530 | 67549 | ACAAGTCTTATCACTTCTGC | 20 | 2151 |
| 1316658 | N/A | N/A | 17539 | 17558 | TCATAAATTCATACAGATAC | 79 | 2152 |
| 1316691 | N/A | N/A | 141140 | 141159 | CCATCTCTCACCCTGAGGTT | 80 | 2153 |
| 1316709 | N/A | N/A | 12295 | 12314 | ACCTCAGTAAAATATAAGCA | 85 | 2154 |
| 1316710 | N/A | N/A | 117968 | 117987 | AACCATATAATCCCAACAAT | 77 | 2155 |
| 1316769 | N/A | N/A | 100453 | 100472 | TGGGTATTTTCCTTGACTCC | 82 | 2156 |
| 1316772 | N/A | N/A | 130155 | 130174 | TATGTGTAATATATACTCTC | 29 | 2157 |
| 1316857 | N/A | N/A | 131302 | 131321 | CCTTTTCTACAAATTAACTT | 96 | 2158 |
| 1316901 | N/A | N/A | 53041 | 53060 | GTTGACTTTCTAAATTACCA | 69 | 2159 |
| 1316904 | N/A | N/A | 108878 | 108897 | GGAGAACTGCTATCAAGGCA | 65 | 2160 |
| 1317006 | N/A | N/A | 118798 | 118817 | GTCACCCATATTACTCATGC | 47 | 2161 |
| 1317015 | N/A | N/A | 37074 | 37093 | GTACCTAGCACTTCACCTCC | 82 | 2162 |
| 1317041 | N/A | N/A | 2278 | 2297 | GGCAATTAACCTCCCCATCA | 51 | 2163 |
| 1317078 | 5486 | 5505 | 115364 | 115383 | TGGATCAGACACATTAGCAG | 54 | 2164 |
| 1317099 | N/A | N/A | 106700 | 106719 | ACCCTTACACATACTTGGTT | 88 | 2165 |
| 1317204 | N/A | N/A | 8344 | 8363 | TGCATATTAAAATCTGGGAA | 22 | 2166 |
| 1317210 | N/A | N/A | 4014 | 4033 | GTTATTATTCTAGCCAGGCA | 68 | 2167 |

TABLE 30
Reduction of HTT RNA by 5-10-5 MOE gapmers with mixed PO/PS internucleoside
linkages in A431 cells

| | SEQ | SEQ | SEQ | SEQ | | | |
|---|---|---|---|---|---|---|---|
| | ID No: | ID No: | ID No: | ID No: | | HTT | SEQ |
| Compound | 1 Start | 1 Stop | 2 Start | 2 Stop | | (% | ID |
| Number | Site | Site | Site | Site | Sequence (5′ to 3′) | UTC) | NO |
| 388241 | 4862 | 4881 | 106917 | 106936 | CTCAGTAACATTGACACCAC | 24 | 858 |
| 1314479 | N/A | N/A | 22878 | 22897 | TTTTCCACATATCTGAGGCT | 78 | 2168 |
| 1314486 | 2697 | 2716 | 60758 | 60777 | AGTCAGCACATCGATGATCA | 75 | 2169 |
| 1314487 | N/A | N/A | 10160 | 10179 | GTTCTTAGATATTATGGGTA | 17 | 2170 |
| 1314582 | N/A | N/A | 48405 | 48424 | CAGACGGATTTTCTCAAGTC | 84 | 2171 |
| 1314670 | N/A | N/A | 26046 | 26065 | GCACTTCCAAACCATACAAT | 65 | 2172 |
| | | | 26134 | 26153 | | | |
| 1314674 | N/A | N/A | 45772 | 45791 | CAGTCACAATAACCTAGACT | 90 | 2173 |
| 1314703 | 4739 | 4758 | 104726 | 104745 | GTCACAGCCTTCCTTCCACT | 52 | 2174 |
| 1314711 | N/A | N/A | 142923 | 142942 | GCATAATCATCTTCACCCAA | 42 | 2175 |
| 1314784 | N/A | N/A | 24155 | 24174 | GTATACCATTTCCAACCACA | 66 | 2176 |
| 1314840 | N/A | N/A | 47107 | 47126 | TGCCATATTTATTAGCACTT | 73 | 2177 |
| 1314868 | N/A | N/A | 118797 | 118816 | TCACCCATATTACTCATGCA | 63 | 2178 |
| 1314904 | N/A | N/A | 8261 | 8280 | GCTTTGTTTTTCATCTGTGC | 21 | 2179 |
| 1314929 | N/A | N/A | 52292 | 52311 | AGTTAAACTATCCATAGGCA | 65 | 2180 |
| 1314956 | N/A | N/A | 2254 | 2273 | CGTGTTGGTTTTATTCCCAA | 67 | 2181 |
| 1314962 | N/A | N/A | 106660 | 106679 | GGTTATCAATCATTATACCA | 85 | 2182 |
| 1314993 | N/A | N/A | 67526 | 67545 | GTCTTATCACTTCTGCAATC | 37 | 2183 |
| 1315080 | N/A | N/A | 130141 | 130160 | ACTCTCAGTTATCTATTCCT | 42 | 2184 |
| 1315208 | N/A | N/A | 13193 | 13212 | GTGTTGAATTACCCACTCCA | 88 | 2185 |
| 1315255 | N/A | N/A | 153568 | 153587 | GTGGCACTGTCCTTCAGCCC | 73 | 2186 |
| | | | 153636 | 153655 | | | |
| | | | 153670 | 153689 | | | |
| | | | 153704 | 153723 | | | |
| | | | 153738 | 153757 | | | |
| | | | 153772 | 153791 | | | |
| | | | 153806 | 153825 | | | |
| | | | 153840 | 153859 | | | |
| | | | 153874 | 153893 | | | |
| | | | 153908 | 153927 | | | |
| | | | 153942 | 153961 | | | |
| | | | 153976 | 153995 | | | |
| | | | 154010 | 154029 | | | |
| | | | 154044 | 154063 | | | |
| | | | 154078 | 154097 | | | |
| 1315280 | N/A | N/A | 22260 | 22279 | GCAGCAGCATATACCGAGTC | 54 | 2187 |
| 1315336 | N/A | N/A | 19114 | 19133 | TCCGTTTTCAACTATTTCAA | 54 | 2188 |
| 1315342 | N/A | N/A | 117135 | 117154 | TAGTCATTTATTTAAAGCAA | 77 | 2189 |
| 1315400 | N/A | N/A | 100416 | 100435 | TTGTAGCTATTTAATCGCTA | 94 | 2190 |
| 1315428 | N/A | N/A | 107008 | 107027 | CACATGGCACTTCCTTCCAT | 70 | 2191 |
| 1315439 | N/A | N/A | 45313 | 45332 | GCATATCTAAAATTATCAAT | 93 | 2192 |
| 1315500 | N/A | N/A | 72947 | 72966 | ATCAACTAACATCTTTCCTA | 98 | 2193 |
| 1315674 | N/A | N/A | 126670 | 126689 | TGGTAAAATAACATTTCCAA | 81 | 2194 |
| 1315681 | N/A | N/A | 34748 | 34767 | GAGCACCTACTCCCATTCCA | 69 | 2195 |
| 1315696 | N/A | N/A | 133527 | 133546 | AACAACCCAAAATAACCTCA | 80 | 2196 |
| 1315718 | N/A | N/A | 19868 | 19887 | CATCATAAAACAATTTTCCA | 105 | 2197 |
| 1315733 | N/A | N/A | 16581 | 16600 | TGCTCATCCATACTTAGGAA | 28 | 2198 |
| 1315737 | N/A | N/A | 133948 | 133967 | CTATTTTCCCACTCATCACA | 91 | 2199 |
| 1315740 | N/A | N/A | 15199 | 15218 | TCTTCCCACAACATTTCCAC | 84 | 2200 |
| 1315760 | N/A | N/A | 33515 | 33534 | AAGCAATTCATTCCCTGTTA | 82 | 2201 |
| 1315778 | 10934 | 10953 | 167683 | 167702 | CACTTCCATTTTAATGACTT | 82 | 2202 |
| 1315876 | N/A | N/A | 17526 | 17545 | CAGATACACACATACACTCT | 85 | 2203 |
| 1315922 | N/A | N/A | 121269 | 121288 | GGGAAATACTTCACAGAGCA | 32 | 2204 |
| 1315937 | N/A | N/A | 137723 | 137742 | GTTTAGCCATTTAAAGATTG | 82 | 2205 |
| 1315949 | N/A | N/A | 81076 | 81095 | GTTTTTTCACTCACTACATC | 72 | 2206 |
| 1315988 | N/A | N/A | 37032 | 37051 | GAAAAGTACATTCATAGGTT | 89 | 2207 |
| 1316061 | 5436 | 5455 | 115314 | 115333 | TTGCTGCTCACTCATTTCCA | 26 | 2208 |
| 1316132 | N/A | N/A | 3714 | 3733 | ATAGATATATATTATTCTAA | 116 | 2209 |
| 1316153 | N/A | N/A | 130780 | 130799 | TACTTTGTTTTTTAAATCAT | 95 | 2210 |
| 1316154 | N/A | N/A | 58665 | 58684 | AGAGATTCATCATATTGCCA | 25 | 2211 |
| 1316255 | N/A | N/A | 6012 | 6031 | TCATGCTACTCCTCTGCTCT | 64 | 2212 |
| 1316256 | N/A | N/A | 34403 | 34422 | CTTATTTTTCAGAATACGAA | 75 | 2213 |
| 1316262 | N/A | N/A | 68832 | 68851 | AGCCATACTCCCCTTACAGC | 36 | 2214 |
| 1316285 | N/A | N/A | 108824 | 108843 | ACCCACCTTTCACAAGGACC | 87 | 2215 |
| 1316286 | N/A | N/A | 44419 | 44438 | AGGTGTTAATTTACACAGTG | 84 | 2216 |
| 1316320 | N/A | N/A | 64097 | 64116 | GCTACAACAAGAACCAATCT | 75 | 2217 |
| 1316334 | N/A | N/A | 30175 | 30194 | GCCCACCTTTTTAATTTCCT | 90 | 2218 |
| 1316367 | N/A | N/A | 149088 | 149107 | TTTTAATTCAACCTACACTC | 98 | 2219 |
| 1316453 | N/A | N/A | 50263 | 50282 | GCTCTCAATTAAATACTCAA | 36 | 2220 |
| 1316459 | N/A | N/A | 134891 | 134910 | CTATCTTCTCATCAATACTC | 87 | 2221 |
| 1316492 | N/A | N/A | 97718 | 97737 | CCATTCTGAATGCCTAGATA | 107 | 2222 |
| 1316521 | N/A | N/A | 110505 | 110524 | CCCAGGTATCTCCTAGGCTT | 89 | 2223 |
| 1316543 | N/A | N/A | 53038 | 53057 | GACTTTCTAAATTACCATTT | 45 | 2224 |
| 1316582 | N/A | N/A | 77632 | 77651 | TCTCTTTTTCCTGTGGGCCA | 49 | 2225 |
| 1316604 | 1175 | 1194 | 42524 | 42543 | GAGACTTCCATTTCTTTCCT | 19 | 2226 |
| 1316611 | 3702 | 3721 | 80649 | 80668 | TGGTTCTTTCTCCTTCCCCT | 41 | 2227 |
| 1316646 | 1912 | 1931 | 56246 | 56265 | GCAGGCCCAAATACTGGTTG | 49 | 2228 |
| 1316651 | N/A | N/A | 73838 | 73857 | CACGAAACTCTCCTATAGCC | 85 | 2229 |
| 1316699 | N/A | N/A | 87068 | 87087 | GCTCTGTTACTTCCTCAGGC | 71 | 2230 |
| 1316760 | N/A | N/A | 71900 | 71919 | GTTCCTAAATCATCACCATT | 80 | 2231 |
| 1316818 | N/A | N/A | 70273 | 70292 | GTACATAATTTAATTATTCT | 87 | 2232 |
| 1316840 | N/A | N/A | 18154 | 18173 | TCTAAAGCTTTATATTTTCC | 79 | 2233 |
| 1316842 | N/A | N/A | 59479 | 59498 | AGACTTTACACTTAATGATA | 72 | 2234 |
| 1316896 | N/A | N/A | 40948 | 40967 | ACTATGTTACTTAAGAACAT | 85 | 2235 |
| 1316900 | N/A | N/A | 83012 | 83031 | GCCAACAACTTCATGAGCAC | 98 | 2236 |
| 1316947 | N/A | N/A | 117966 | 117985 | CCATATAATCCCAACAATGC | 93 | 2237 |
| 1317003 | N/A | N/A | 22009 | 22028 | CTTCATCACAATCTACCTTA | 75 | 2238 |
| 1317137 | N/A | N/A | 127953 | 127972 | CCTTAGACACTCACATGCTT | 49 | 2239 |
| 1317139 | N/A | N/A | 54878 | 54897 | AGTTCTTAAAATAATGCACA | 43 | 2240 |
| 1317171 | N/A | N/A | 141101 | 141120 | TACTATCAAAATCATCACTA | 82 | 2241 |
| 1317184 | N/A | N/A | 12168 | 12187 | AGATGCCTCCTTCCCATCCA | 84 | 2242 |
| 1317209 | N/A | N/A | 112701 | 112720 | AGCTACATTTTTCCCATAAC | 60 | 2243 |
| 1317222 | N/A | N/A | 101905 | 101924 | GCAGAGCCACACAGCTCCCA | 90 | 2244 |

TABLE 31
Reduction of HTT RNA by 5-10-5 MOE gapmers with mixed PO/PS internucleoside
linkages in A431 cells

| | SEQ | SEQ | SEQ | SEQ | | | |
|---|---|---|---|---|---|---|---|
| | ID No: | ID No: | ID No: | ID No: | | HTT | SEQ |
| Compound | 1 Start | 1 Stop | 2 Start | 2 Stop | | (% | ID |
| Number | Site | Site | Site | Site | Sequence (5′ to 3′) | UTC) | NO |
| 388241 | 4862 | 4881 | 106917 | 106936 | CTCAGTAACATTGACACCAC | 31 | 858 |
| 1314483 | N/A | N/A | 130779 | 130798 | ACTTTGTTTTTTAAATCATT | 89 | 2245 |
| 1314484 | N/A | N/A | 45770 | 45789 | GTCACAATAACCTAGACTCA | 95 | 2246 |
| 1314622 | 665 | 684 | N/A | N/A | CCATTCTTTTTAATTTCCTT | 36 | 2247 |
| 1314625 | N/A | N/A | 118780 | 118799 | GCAAGGCCAATCACATAGGC | 93 | 2248 |
| 1314666 | N/A | N/A | 8212 | 8231 | TGTAACTTTTATAATTTTCA | 47 | 2249 |
| 1314808 | N/A | N/A | 19110 | 19129 | TTTTCAACTATTTCAAGGCA | 85 | 2250 |
| 1314830 | N/A | N/A | 106565 | 106584 | GCTCCTATAATTTAACACCA | 69 | 2251 |
| 1314878 | N/A | N/A | 16580 | 16599 | GCTCATCCATACTTAGGAAC | 54 | 2252 |
| 1314884 | N/A | N/A | 26045 | 26064 | CACTTCCAAACCATACAATA | 92 | 2253 |
| | | | 26133 | 26152 | | | |
| 1314915 | N/A | N/A | 52281 | 52300 | CCATAGGCAATTTTTCATCC | 40 | 2254 |
| 1314944 | N/A | N/A | 36952 | 36971 | GGAAAATGATTTCTACCCCA | 83 | 2255 |
| 1314963 | N/A | N/A | 110471 | 110490 | TGCAAATTCACTCAAATGTC | 78 | 2256 |
| 1314990 | N/A | N/A | 126632 | 126651 | ACACTGTTACTTCATTATCT | 62 | 2257 |
| 1315013 | N/A | N/A | 24152 | 24171 | TACCATTTCCAACCACACTT | 94 | 2258 |
| 1315023 | N/A | N/A | 130140 | 130159 | CTCTCAGTTATCTATTCCTA | 46 | 2259 |
| 1315066 | N/A | N/A | 71875 | 71894 | TGCTAGGTCACAATTAAGTG | 49 | 2260 |
| 1315108 | N/A | N/A | 13191 | 13210 | GTTGAATTACCCACTCCACT | 90 | 2261 |
| 1315132 | N/A | N/A | 73728 | 73747 | GGCCACATCCTCCATTATCA | 96 | 2262 |
| 1315210 | N/A | N/A | 60655 | 60674 | CAGGTTAGTCCCACTCAGTA | 91 | 2263 |
| 1315220 | N/A | N/A | 53037 | 53056 | ACTTTCTAAATTACCATTTA | 74 | 2264 |
| 1315225 | N/A | N/A | 2250 | 2269 | TTGGTTTTATTCCCAACACA | 90 | 2265 |
| 1315229 | N/A | N/A | 112700 | 112719 | GCTACATTTTTCCCATAACA | 52 | 2266 |
| 1315265 | N/A | N/A | 68831 | 68850 | GCCATACTCCCCTTACAGCG | 51 | 2267 |
| 1315267 | N/A | N/A | 22867 | 22886 | TCTGAGGCTTTTCCAGGTTA | 48 | 2268 |
| 1315292 | N/A | N/A | 137675 | 137694 | TCTTAGTTTAATACTCAGAA | 84 | 2269 |
| 1315296 | N/A | N/A | 44393 | 44412 | GAAGCAGTATATCAGACCAC | 66 | 2270 |
| 1315302 | N/A | N/A | 22250 | 22269 | ATACCGAGTCTTACTTTTCC | 49 | 2271 |
| 1315326 | N/A | N/A | 17520 | 17539 | CACACATACACTCTTCTTTC | 77 | 2272 |
| 1315394 | N/A | N/A | 141093 | 141112 | AAATCATCACTATAACCTCC | 84 | 2273 |
| 1315417 | N/A | N/A | 42357 | 42376 | AGCAAGACATCTTAACATCT | 98 | 2274 |
| 1315511 | N/A | N/A | 134883 | 134902 | TCATCAATACTCAAACAGGT | 51 | 2275 |
| 1315541 | N/A | N/A | 107007 | 107026 | ACATGGCACTTCCTTCCATC | 78 | 2276 |
| 1315562 | N/A | N/A | 108445 | 108464 | AACACAAGTTCCTCTAGGGC | 28 | 2277 |
| 1315671 | N/A | N/A | 40940 | 40959 | ACTTAAGAACATCCATTTCC | 80 | 2278 |
| 1315747 | N/A | N/A | 10100 | 10119 | ATTAAGGTTTCATTTCTCTA | 18 | 2279 |
| 1315754 | N/A | N/A | 54865 | 54884 | ATGCACAGTATTAATCACAT | 25 | 2280 |
| 1315766 | N/A | N/A | 56227 | 56246 | GTCGGTACCGTCTAACACCT | 76 | 2281 |
| 1315843 | N/A | N/A | 100379 | 100398 | ACAAGGGATTCTATTATTGC | 46 | 2282 |
| 1315861 | N/A | N/A | 142801 | 142820 | TGAGTATTCATAACAAGACT | 71 | 2283 |
| 1315868 | N/A | N/A | 19867 | 19886 | ATCATAAAACAATTTTCCAT | 97 | 2284 |
| 1315902 | N/A | N/A | 45281 | 45300 | CTTGCTTAATAGTTTGGCCA | 86 | 2285 |
| 1315907 | N/A | N/A | 117964 | 117983 | ATATAATCCCAACAATGCTA | 89 | 2286 |
| 1315947 | N/A | N/A | 15198 | 15217 | CTTCCCACAACATTTCCACA | 91 | 2287 |
| 1315956 | N/A | N/A | 80421 | 80440 | ACACTGTACACATTTTATTT | 84 | 2288 |
| 1315999 | N/A | N/A | 82942 | 82961 | GCACAAACATTATCATTAAA | 58 | 2289 |
| 1316016 | N/A | N/A | 127949 | 127968 | AGACACTCACATGCTTGTTA | 41 | 2290 |
| 1316104 | N/A | N/A | 97693 | 97712 | GCATTCAGAATGCACAGCCT | 111 | 2291 |
| 1316134 | N/A | N/A | 58633 | 58652 | TACCACAGACTTTCTGGATT | 84 | 2292 |
| 1316141 | N/A | N/A | 86309 | 86328 | TTCCTAACTTTCTTTCATAA | 114 | 2293 |
| 1316179 | N/A | N/A | 47093 | 47112 | GCACTTTTAATACTATATCA | 79 | 2294 |
| 1316197 | N/A | N/A | 18151 | 18170 | AAAGCTTTATATTTTCCCAA | 45 | 2295 |
| 1316215 | N/A | N/A | 153260 | 153279 | TGGTCATTTTCACTTATCTT | 48 | 2296 |
| 1316303 | N/A | N/A | 81070 | 81089 | TCACTCACTACATCTATTCC | 84 | 2297 |
| 1316317 | N/A | N/A | 22003 | 22022 | CACAATCTACCTTATTACAC | 87 | 2298 |
| 1316439 | N/A | N/A | 133943 | 133962 | TTCCCACTCATCACAGGACA | 103 | 2299 |
| 1316536 | N/A | N/A | 72939 | 72958 | ACATCTTTCCTATAAATCAG | 85 | 2300 |
| 1316555 | N/A | N/A | 148916 | 148935 | GTCAAGACACCATTCAGCTA | 83 | 2301 |
| 1316561 | N/A | N/A | 133522 | 133541 | CCCAAAATAACCTCATGCTC | 61 | 2302 |
| 1316573 | N/A | N/A | 70222 | 70241 | TGTCAGCAACATAAATTCTT | 44 | 2303 |
| 1316631 | N/A | N/A | 59475 | 59494 | TTTACACTTAATGATAGGTT | 65 | 2304 |
| 1316633 | N/A | N/A | 121128 | 121147 | CAATGTCAACTTTATTACTA | 89 | 2305 |
| 1316636 | N/A | N/A | 11756 | 11775 | GTAGTCACTTTCACTTCACC | 35 | 2306 |
| 1316685 | N/A | N/A | 3678 | 3697 | GAGCATTTTAAATCTATCTT | 37 | 2307 |
| 1316742 | N/A | N/A | 77458 | 77477 | GAACGAACTCATACACGCTC | 76 | 2308 |
| 1316757 | N/A | N/A | 64094 | 64113 | ACAACAAGAACCAATCTCAC | 100 | 2309 |
| 1316776 | 5432 | 5451 | 115310 | 115329 | TGCTCACTCATTTCCACCTT | 35 | 2310 |
| 1316841 | N/A | N/A | 117134 | 117153 | AGTCATTTATTTAAAGCAAA | 85 | 2311 |
| 1316882 | N/A | N/A | 33511 | 33530 | AATTCATTCCCTGTTAGGGA | 98 | 2312 |
| 1316891 | 10930 | 10949 | 167679 | 167698 | TCCATTTTAATGACTTGGCT | 66 | 2313 |
| 1316965 | N/A | N/A | 50196 | 50215 | GTGACAGCAATTCTTTTCCT | 29 | 2314 |
| 1316994 | 4736 | 4755 | 104723 | 104742 | ACAGCCTTCCTTCCACTGGC | 98 | 2315 |
| 1317035 | N/A | N/A | 48404 | 48423 | AGACGGATTTTCTCAAGTCA | 98 | 2316 |
| 1317079 | N/A | N/A | 101851 | 101870 | CCTGCTAAATTCCATTCCTT | 66 | 2317 |
| 1317147 | N/A | N/A | 34330 | 34349 | GAGGACAGAATTCTAATCCA | 81 | 2318 |
| 1317149 | N/A | N/A | 67048 | 67067 | CTGAAGCTTTTTTCTAGAAA | 51 | 2319 |
| 1317166 | N/A | N/A | 6011 | 6030 | CATGCTACTCCTCTGCTCTA | 85 | 2320 |
| 1317228 | N/A | N/A | 34747 | 34766 | AGCACCTACTCCCATTCCAA | 80 | 2321 |

TABLE 32
Reduction of HTT RNA by 5-10-5 MOE gapmers with mixed PO/PS internucleoside
linkages in A431 cells

| | SEQ | SEQ | SEQ | SEQ | | | |
|---|---|---|---|---|---|---|---|
| | ID No: | ID No: | ID No: | ID No: | | HTT | SEQ |
| Compound | 1 Start | 1 Stop | 2 Start | 2 Stop | | (% | ID |
| Number | Site | Site | Site | Site | Sequence (5′ to 3′) | UTC) | NO |
| 388241 | 4862 | 4881 | 106917 | 106936 | CTCAGTAACATTGACACCAC | 24 | 858 |
| 1314533 | N/A | N/A | 33490 | 33509 | AAGCCAGTTTTATATTCCAA | 47 | 2322 |
| 1314567 | N/A | N/A | 3677 | 3696 | AGCATTTTAAATCTATCTTA | 80 | 2323 |
| 1314590 | N/A | N/A | 53006 | 53025 | GGCTATATAAAAATTATGGC | 74 | 2324 |
| 1314596 | N/A | N/A | 130139 | 130158 | TCTCAGTTATCTATTCCTAA | 26 | 2325 |
| 1314657 | N/A | N/A | 133521 | 133540 | CCAAAATAACCTCATGCTCA | 57 | 2326 |
| 1314681 | N/A | N/A | 15195 | 15214 | CCCACAACATTTCCACAAAT | 90 | 2327 |
| 1314687 | N/A | N/A | 2249 | 2268 | TGGTTTTATTCCCAACACAC | 77 | 2328 |
| 1314712 | 3090 | 3109 | N/A | N/A | GCCTCTATATATTCTGGTTA | 66 | 2329 |
| 1314739 | N/A | N/A | 126630 | 126649 | ACTGTTACTTCATTATCTAA | 54 | 2330 |
| 1314763 | N/A | N/A | 68813 | 68832 | CGTTGCCTACTATCTGTTTA | 36 | 2331 |
| 1314819 | N/A | N/A | 80417 | 80436 | TGTACACATTTTATTTACTT | 94 | 2332 |
| 1314873 | N/A | N/A | 22244 | 22263 | AGTCTTACTTTTCCATTCAA | 44 | 2333 |
| 1314899 | N/A | N/A | 108444 | 108463 | ACACAAGTTCCTCTAGGGCA | 24 | 2334 |
| 1315073 | 5428 | 5447 | 115306 | 115325 | CACTCATTTCCACCTTCAGC | 29 | 2335 |
| 1315115 | N/A | N/A | 19109 | 19128 | TTTCAACTATTICAAGGCAA | 57 | 2336 |
| 1315121 | N/A | N/A | 30084 | 30103 | GGAAGACACATCCCATCACT | 93 | 2337 |
| 1315148 | N/A | N/A | 70218 | 70237 | AGCAACATAAATTCTTATTA | 62 | 2338 |
| 1315211 | N/A | N/A | 47028 | 47047 | GACAATTTTTCCACAGGGCC | 65 | 2339 |
| 1315213 | N/A | N/A | 34329 | 34348 | AGGACAGAATTCTAATCCAA | 80 | 2340 |
| 1315239 | N/A | N/A | 148850 | 148869 | CCTTATTTTATTCCCCACCA | 77 | 2341 |
| 1315249 | N/A | N/A | 22856 | 22875 | TCCAGGTTATCTTCCTATAA | 58 | 2342 |
| 1315289 | N/A | N/A | 16531 | 16550 | AAGCAGACTACATTTTCACA | 63 | 2343 |
| 1315434 | N/A | N/A | 130775 | 130794 | TGTTTTTTAAATCATTAGTT | 84 | 2344 |
| 1315441 | N/A | N/A | 77383 | 77402 | TGCTTGCTCACTTCTTCCTG | 70 | 2345 |
| 1315485 | N/A | N/A | 142746 | 142765 | ACTGATTGATTTCAATCCAC | 39 | 2346 |
| 1315571 | N/A | N/A | 26043 | 26062 | CTTCCAAACCATACAATAGA | 95 | 2347 |
| | | | 26131 | 26150 | | | |
| 1315581 | N/A | N/A | 17517 | 17536 | ACATACACTCTTCTTTCTGT | 59 | 2348 |
| 1315590 | N/A | N/A | 44344 | 44363 | TTCTCAATAAATGAACTCTA | 70 | 2349 |
| 1315619 | N/A | N/A | 60653 | 60672 | GGTTAGTCCCACTCAGTACC | 97 | 2350 |
| 1315641 | N/A | N/A | 106414 | 106433 | CCACATAATACATTTAGTCA | 45 | 2351 |
| 1315664 | N/A | N/A | 18148 | 18167 | GCTTTATATTTTCCCAAATT | 46 | 2352 |
| 1315672 | N/A | N/A | 127938 | 127957 | TGCTTGTTACATATTATCTT | 18 | 2353 |
| 1315707 | N/A | N/A | 140849 | 140868 | GCCACTTTTATTTTACAGTA | 75 | 2354 |
| 1315708 | N/A | N/A | 107004 | 107023 | TGGCACTTCCTTCCATCTGC | 51 | 2355 |
| 1315730 | N/A | N/A | 86303 | 86322 | ACTTTCTTTCATAATGAGAA | 93 | 2356 |
| 1315809 | N/A | N/A | 45741 | 45760 | AAAGATTTCAGTACTACTCC | 53 | 2357 |
| 1315815 | N/A | N/A | 117936 | 117955 | TTTTAGTTCCCCTTCCACTC | 89 | 2358 |
| 1315839 | N/A | N/A | 6005 | 6024 | ACTCCTCTGCTCTAATCCTC | 82 | 2359 |
| 1315930 | N/A | N/A | 73678 | 73697 | TGCTCTTTCCTACCAGCCCA | 76 | 2360 |
| 1315935 | N/A | N/A | 82902 | 82921 | GCCAAGCACTATATACAACT | 58 | 2361 |
| 1315964 | N/A | N/A | 10094 | 10113 | GTTTCATTTCTCTAGGATTA | 14 | 2362 |
| 1315965 | N/A | N/A | 34746 | 34765 | GCACCTACTCCCATTCCAAA | 79 | 2363 |
| 1315990 | N/A | N/A | 81069 | 81088 | CACTCACTACATCTATTCCT | 87 | 2364 |
| 1316052 | 10190 | 10209 | 166939 | 166958 | TCACATACTTTACACGGGCA | 34 | 2365 |
| 1316073 | N/A | N/A | 59459 | 59478 | GGTTATTTCTAAATATATCC | 76 | 2366 |
| 1316088 | N/A | N/A | 50195 | 50214 | TGACAGCAATTCTTTTCCTA | 29 | 2367 |
| 1316119 | N/A | N/A | 101840 | 101859 | CCATTCCTTTTTAAAGAGGT | 60 | 2368 |
| 1316126 | N/A | N/A | 133918 | 133937 | TACAGGCATTCTAAATGCTA | 86 | 2369 |
| 1316140 | N/A | N/A | 52279 | 52298 | ATAGGCAATTTTTCATCCCA | 43 | 2370 |
| 1316157 | N/A | N/A | 40939 | 40958 | CTTAAGAACATCCATTTCCC | 74 | 2371 |
| 1316250 | N/A | N/A | 117119 | 117138 | GCAAAGCATTCTCATTACAA | 29 | 2372 |
| 1316254 | N/A | N/A | 54861 | 54880 | ACAGTATTAATCACATTTCA | 24 | 2373 |
| 1316316 | N/A | N/A | 56127 | 56146 | AAAGAGCACATTTTACACAC | 80 | 2374 |
| 1316358 | N/A | N/A | 19859 | 19878 | ACAATTTTCCATATAAAGTA | 110 | 2375 |
| 1316365 | N/A | N/A | 152925 | 152944 | GCTTTCACTAAATCAGGAAC | 63 | 2376 |
| 1316416 | N/A | N/A | 13184 | 13203 | TACCCACTCCACTTAGTTCT | 86 | 2377 |
| 1316465 | N/A | N/A | 45260 | 45279 | GCCTAGGATTATATTAAATT | 91 | 2378 |
| 1316542 | N/A | N/A | 72933 | 72952 | TTCCTATAAATCAGAGCTCC | 76 | 2379 |
| 1316572 | N/A | N/A | 24064 | 24083 | AGCTTATCTATATCTTCTTG | 67 | 2380 |
| 1316638 | 4717 | 4736 | 104704 | 104723 | CCATGATGCCATCACAGAGC | 30 | 2381 |
| 1316652 | N/A | N/A | 11415 | 11434 | GCCAGCCTCCTCTAATTGTG | 86 | 2382 |
| 1316669 | N/A | N/A | 137634 | 137653 | TTGAAGCTTTCTTTTACAGT | 45 | 2383 |
| 1316692 | N/A | N/A | 7818 | 7837 | GGTCCTATCATATTTTAACC | 60 | 2384 |
| 1316698 | N/A | N/A | 36896 | 36915 | TGGCATTTTTATGAATGCAA | 85 | 2385 |
| 1316714 | N/A | N/A | 118749 | 118768 | GCTGAGAACACAGCCTGCTA | 95 | 2386 |
| 1316716 | N/A | N/A | 121124 | 121143 | GTCAACTTTATTACTATAGA | 24 | 2387 |
| 1316752 | N/A | N/A | 71846 | 71865 | TCCTAAACTTCTAATTCACA | 103 | 2388 |
| 1316761 | N/A | N/A | 100345 | 100364 | GCAACTCAAATACCTGTTCA | 49 | 2389 |
| 1316838 | N/A | N/A | 64085 | 64104 | ACCAATCTCACAATTAAGTA | 47 | 2390 |
| 1316860 | N/A | N/A | 22002 | 22021 | ACAATCTACCTTATTACACC | 76 | 2391 |
| 1316884 | N/A | N/A | 58620 | 58639 | CTGGATTATAATTCTAGGTT | 59 | 2392 |
| 1316941 | N/A | N/A | 110470 | 110489 | GCAAATTCACTCAAATGTCA | 74 | 2393 |
| 1317052 | N/A | N/A | 48299 | 48318 | CCTACTGTTTTCATTTCTCA | 61 | 2394 |
| 1317113 | N/A | N/A | 134881 | 134900 | ATCAATACTCAAACAGGTCA | 56 | 2395 |
| 1317129 | N/A | N/A | 42356 | 42375 | GCAAGACATCTTAACATCTG | 97 | 2396 |
| 1317195 | N/A | N/A | 97647 | 97666 | AACTGGTTTCCATCAGCTGC | 91 | 2397 |
| 1317197 | N/A | N/A | 112697 | 112716 | ACATTTTTCCCATAACAGAA | 82 | 2398 |

TABLE 33
Reduction of HTT RNA by 5-10-5 MOE gapmers with mixed PO/PS internucleoside
linkages in A431 cells

| | SEQ | SEQ | SEQ | SEQ | | | |
|---|---|---|---|---|---|---|---|
| | ID No: | ID No: | ID No: | ID No: | | HTT | SEQ |
| Compound | 1 Start | 1 Stop | 2 Start | 2 Stop | | (% | ID |
| Number | Site | Site | Site | Site | Sequence (5′ to 3′) | UTC) | NO |
| 388241 | 4862 | 4881 | 106917 | 106936 | CTCAGTAACATTGACACCAC | 42 | 858 |
| 1314526 | N/A | N/A | 59378 | 59397 | GAAGCATTAACTTTACTGGC | 45 | 2399 |
| 1314536 | N/A | N/A | 25828 | 25847 | AACAGAGCACCTCCAAACCA | 96 | 2400 |
| | | | 25851 | 25870 | | | |
| | | | 25897 | 25916 | | | |
| | | | 25962 | 25981 | | | |
| | | | 26182 | 26201 | | | |
| | | | 26205 | 26224 | | | |
| 1314549 | N/A | N/A | 22243 | 22262 | GTCTTACTTTTCCATTCAAT | 42 | 2401 |
| 1314551 | N/A | N/A | 50190 | 50209 | GCAATTCTTTTCCTATGCAA | 74 | 2402 |
| 1314594 | N/A | N/A | 133914 | 133933 | GGCATTCTAAATGCTACCTC | 72 | 2403 |
| 1314653 | N/A | N/A | 30083 | 30102 | GAAGACACATCCCATCACTA | 105 | 2404 |
| 1314713 | N/A | N/A | 18117 | 18136 | AGGTTGTATCACCTCTGACA | 83 | 2405 |
| 1314734 | N/A | N/A | 56125 | 56144 | AGAGCACATTTTACACACAG | 70 | 2406 |
| 1314796 | N/A | N/A | 53005 | 53024 | GCTATATAAAAATTATGGCA | 100 | 2407 |
| 1314822 | N/A | N/A | 16529 | 16548 | GCAGACTACATTTTCACAAT | 33 | 2408 |
| 1314854 | N/A | N/A | 22846 | 22865 | CTTCCTATAATATATTCCAA | 95 | 2409 |
| 1314898 | N/A | N/A | 24063 | 24082 | GCTTATCTATATCTTCTTGA | 83 | 2410 |
| 1314960 | N/A | N/A | 34681 | 34700 | GCATGAAGAAATATTACACT | 59 | 2411 |
| 1314979 | N/A | N/A | 118732 | 118751 | CTAGAGGTCATCTTCGGTCA | 44 | 2412 |
| 1314989 | N/A | N/A | 19076 | 19095 | GTCCTTGTTATTCTATCTTA | 56 | 2413 |
| 1315030 | N/A | N/A | 3676 | 3695 | GCATTTTAAATCTATCTTAC | 45 | 2414 |
| 1315044 | N/A | N/A | 33475 | 33494 | TCCAACAGTCCCTAATGGGA | 90 | 2415 |
| 1315050 | N/A | N/A | 48296 | 48315 | ACTGTTTTCATTTCTCAGCA | 56 | 2416 |
| 1315089 | N/A | N/A | 52278 | 52297 | TAGGCAATTTTTCATCCCAT | 40 | 2417 |
| 1315100 | N/A | N/A | 106068 | 106087 | CCTCAGTGACACATACGCTC | 93 | 2418 |
| | | | 106124 | 106143 | | | |
| | | | 106180 | 106199 | | | |
| 1315126 | N/A | N/A | 13176 | 13195 | CCACTTAGTTCTACACCTCA | 77 | 2419 |
| 1315180 | N/A | N/A | 82901 | 82920 | CCAAGCACTATATACAACTA | 83 | 2420 |
| 1315288 | N/A | N/A | 15165 | 15184 | CAGAACAGAATCATACACAG | 69 | 2421 |
| 1315318 | N/A | N/A | 42352 | 42371 | GACATCTTAACATCTGACTC | 94 | 2422 |
| 1315332 | N/A | N/A | 2247 | 2266 | GTTTTATTCCCAACACACAT | 82 | 2423 |
| 1315358 | N/A | N/A | 112576 | 112595 | CTGACACAATCATTACCAAC | 156 | 2424 |
| 1315407 | N/A | N/A | 142745 | 142764 | CTGATTGATTTCAATCCACA | 55 | 2425 |
| 1315453 | N/A | N/A | 86216 | 86235 | GTCCTATTCCTTATACACTA | 86 | 2426 |
| 1315455 | N/A | N/A | 45735 | 45754 | TTCAGTACTACTCCATGTCA | 83 | 2427 |
| 1315456 | N/A | N/A | 19845 | 19864 | AAAGTAATATTTACAGGCTC | 78 | 2428 |
| 1315469 | N/A | N/A | 5998 | 6017 | TGCTCTAATCCTCCAGTGAC | 89 | 2429 |
| 1315516 | N/A | N/A | 117915 | 117934 | CCACCTCTATCTCTACCATC | 91 | 2430 |
| 1315607 | N/A | N/A | 133480 | 133499 | TGTACAGTTCATCCTAGTAA | 92 | 2431 |
| 1315663 | N/A | N/A | 106980 | 106999 | GTCAATAAAGTATCCACGAC | 88 | 2432 |
| 1315667 | N/A | N/A | 81068 | 81087 | ACTCACTACATCTATTCCTA | 75 | 2433 |
| 1315717 | N/A | N/A | 45257 | 45276 | TAGGATTATATTAAATTCTA | 101 | 2434 |
| 1315723 | N/A | N/A | 117026 | 117045 | ATCTTATGACTTTCTTGGGT | 29 | 2435 |
| 1315796 | N/A | N/A | 130136 | 130155 | CAGTTATCTATTCCTAAGCT | 79 | 2436 |
| 1315797 | N/A | N/A | 140553 | 140572 | GATGCATATTTTATCTACCT | 47 | 2437 |
| 1315835 | N/A | N/A | 104554 | 104573 | TTCTTTTAAAATTAAGATAC | 95 | 2438 |
| 1315867 | 3009 | 3028 | 66873 | 66892 | ACTGCTTTGATCTCTTGCCA | 20 | 2439 |
| 1315883 | N/A | N/A | 58326 | 58345 | GCTTTAGGTTTAAATCCGAT | 32 | 2440 |
| 1315911 | N/A | N/A | 54852 | 54871 | ATCACATTTCATTAAGACCA | 36 | 2441 |
| 1315987 | N/A | N/A | 64053 | 64072 | TGCAAAAGTCCATCTATACT | 76 | 2442 |
| 1316106 | N/A | N/A | 108443 | 108462 | CACAAGTTCCTCTAGGGCAC | 34 | 2443 |
| 1316144 | N/A | N/A | 40937 | 40956 | TAAGAACATCCATTTCCCAT | 85 | 2444 |
| 1316159 | N/A | N/A | 126625 | 126644 | TACTTCATTATCTAAGGATA | 84 | 2445 |
| 1316183 | N/A | N/A | 77035 | 77054 | GTCCGGTTTTTAACAGAGGT | 80 | 2446 |
| 1316185 | N/A | N/A | 11357 | 11376 | GGGCATGTAAACTCAAGGAC | 52 | 2447 |
| 1316200 | N/A | N/A | 72918 | 72937 | GCTCCATAAAAATCATTTGA | 84 | 2448 |
| 1316209 | N/A | N/A | 36874 | 36893 | CCTCATACAATTTCCCTCCC | 97 | 2449 |
| 1316227 | N/A | N/A | 17494 | 17513 | ATACCTGTTTTAACATCCAA | 78 | 2450 |
| 1316230 | N/A | N/A | 60616 | 60635 | AGAACCGTCACTCTTCAACA | 117 | 2451 |
| 1316287 | N/A | N/A | 21999 | 22018 | ATCTACCTTATTACACCATT | 73 | 2452 |
| 1316338 | N/A | N/A | 110398 | 110417 | GCAGACACCACCTAACTCTC | 83 | 2453 |
| 1316374 | N/A | N/A | 134846 | 134865 | CCCTAGTTTACTTTTAAGTA | 88 | 2454 |
| 1316395 | N/A | N/A | 121123 | 121142 | TCAACTTTATTACTATAGAA | 92 | 2455 |
| 1316436 | N/A | N/A | 97545 | 97564 | CTTGTTGGTTTCAAATACTC | 68 | 2456 |
| 1316479 | N/A | N/A | 34313 | 34332 | CCAAGTCCATCTGATTCCAC | 67 | 2457 |
| 1316538 | N/A | N/A | 10051 | 10070 | TGGGCTGTATACTAACGGTA | 71 | 2458 |
| 1316550 | N/A | N/A | 70217 | 70236 | GCAACATAAATTCTTATTAT | 78 | 2459 |
| 1316591 | N/A | N/A | 80405 | 80424 | ATTTACTTTTACCCACACAA | 71 | 2460 |
| 1316614 | N/A | N/A | 99836 | 99855 | CTGTTCTTTCATCCTTGTTA | 50 | 2461 |
| 1316664 | N/A | N/A | 137618 | 137637 | CAGTCAGAACTTTTACAGCT | 55 | 2462 |
| 1316675 | N/A | N/A | 152835 | 152854 | CCAGCATACACCTGTAGGGC | 68 | 2463 |
| 1316795 | N/A | N/A | 44299 | 44318 | AACCAGTTCATCAAAGAGAT | 95 | 2464 |
| 1316804 | N/A | N/A | 47027 | 47046 | ACAATTTTTCCACAGGGCCA | 89 | 2465 |
| 1316814 | N/A | N/A | 148560 | 148579 | GCAGTGAGTCCCTTAAACCT | 77 | 2466 |
| 1316858 | N/A | N/A | 165381 | 165400 | TGTCAGCATTTTACTTCCCT | 47 | 2467 |
| 1316877 | N/A | N/A | 7813 | 7832 | TATCATATTTTAACCTAGGA | 94 | 2468 |
| 1316980 | N/A | N/A | 71708 | 71727 | TGGCATTCATTTCCCACAGC | 62 | 2469 |
| 1317024 | 4486 | 4505 | 101339 | 101358 | GCAAATCTAAAACCTGCTTC | 62 | 2470 |
| 1317084 | 5427 | 5446 | 115305 | 115324 | ACTCATTTCCACCTTCAGCT | 33 | 2471 |
| 1317090 | N/A | N/A | 127937 | 127956 | GCTTGTTACATATTATCTTA | 16 | 2472 |
| 1317094 | N/A | N/A | 130764 | 130783 | TCATTAGTTATTATTATTCC | 53 | 2473 |
| 1317216 | N/A | N/A | 68794 | 68813 | AAGTTGAAATACATGCTTCA | 73 | 2474 |
| 1317236 | N/A | N/A | 73559 | 73578 | GTCCATACATTATACTTTCT | 46 | 2475 |

TABLE 34
Reduction of HTT RNA by 5-10-5 MOE gapmers with mixed PO/PS internucleoside
linkages in A431 cells

| | SEQ | SEQ | SEQ | SEQ | | | |
|---|---|---|---|---|---|---|---|
| | ID No: | ID No: | ID No: | ID No: | | HTT | SEQ |
| Compound | 1 Start | 1 Stop | 2 Start | 2 Stop | | (% | ID |
| Number | Site | Site | Site | Site | Sequence (5′ to 3′) | UTC) | NO |
| 388241 | 4862 | 4881 | 106917 | 106936 | CTCAGTAACATTGACACCAC | 27 | 858 |
| 1314506 | N/A | N/A | 133876 | 133895 | TGCAAACTGCCTCCACTCAC | 85 | 2476 |
| 1314509 | N/A | N/A | 44288 | 44307 | CAAAGAGATTTACAATCCTT | 90 | 2477 |
| 1314532 | N/A | N/A | 21995 | 22014 | ACCTTATTACACCATTTCAC | 69 | 2478 |
| 1314557 | N/A | N/A | 22242 | 22261 | TCTTACTTTTCCATTCAATC | 41 | 2479 |
| 1314584 | N/A | N/A | 19073 | 19092 | CTTGTTATTCTATCTTAGCC | 80 | 2480 |
| 1314598 | N/A | N/A | 121103 | 121122 | AGGACCACTTTCTCTCTCTT | 70 | 2481 |
| 1314613 | N/A | N/A | 2226 | 2245 | GGCAAAAAACTTCAATCAAC | 41 | 2482 |
| 1314641 | N/A | N/A | 56124 | 56143 | GAGCACATTTTACACACAGA | 37 | 2483 |
| 1314690 | N/A | N/A | 97432 | 97451 | TTTTTGTTTTTACTAGCTCC | 70 | 2484 |
| 1314761 | N/A | N/A | 7724 | 7743 | GGTTGACCAAAATAATCAAA | 55 | 2485 |
| 1314778 | N/A | N/A | 164361 | 164380 | GTAGGGACCAGAACTCCTAA | 92 | 2486 |
| | | | 164423 | 164442 | | | |
| 1314791 | N/A | N/A | 59377 | 59396 | AAGCATTAACTTTACTGGCA | 34 | 2487 |
| 1314849 | N/A | N/A | 58282 | 58301 | GCTGAGGTTTCTACTTTTCT | 13 | 2488 |
| 1314880 | N/A | N/A | 40935 | 40954 | AGAACATCCATTTCCCATTA | 67 | 2489 |
| 1314882 | N/A | N/A | 130135 | 130154 | AGTTATCTATTCCTAAGCTA | 81 | 2490 |
| 1314908 | N/A | N/A | 73558 | 73577 | TCCATACATTATACTTTCTT | 63 | 2491 |
| 1314948 | N/A | N/A | 72840 | 72859 | GGAATGCTTTTACTAGGGCA | 45 | 2492 |
| 1314968 | N/A | N/A | 60613 | 60632 | ACCGTCACTCTTCAACACAC | 75 | 2493 |
| 1315201 | N/A | N/A | 13171 | 13190 | TAGTTCTACACCTCATTCAT | 73 | 2494 |
| 1315256 | N/A | N/A | 140551 | 140570 | TGCATATTTTATCTACCTCT | 46 | 2495 |
| 1315260 | N/A | N/A | 19844 | 19863 | AAGTAATATTTACAGGCTCC | 51 | 2496 |
| 1315270 | N/A | N/A | 68776 | 68795 | CATGAAGTTATTCCTGCTTC | 78 | 2497 |
| 1315322 | N/A | N/A | 5997 | 6016 | GCTCTAATCCTCCAGTGACA | 77 | 2498 |
| 1315346 | N/A | N/A | 106966 | 106985 | CACGACAGTTCCAACATACA | 120 | 2499 |
| 1315370 | N/A | N/A | 137616 | 137635 | GTCAGAACTTTTACAGCTGT | 63 | 2500 |
| 1315438 | N/A | N/A | 17491 | 17510 | CCTGTTTTAACATCCAATCA | 89 | 2501 |
| 1315461 | N/A | N/A | 18001 | 18020 | AGCTTGAGTTTCTATAACAA | 54 | 2502 |
| 1315464 | N/A | N/A | 81064 | 81083 | ACTACATCTATTCCTAAGCA | 84 | 2503 |
| 1315470 | N/A | N/A | 110318 | 110337 | CACTTGCTTTTCTATTGTCT | 71 | 2504 |
| 1315522 | N/A | N/A | 117908 | 117927 | TATCTCTACCATCTACTTGC | 85 | 2505 |
| 1315557 | N/A | N/A | 104538 | 104557 | ATACATATCAATATAAGCAA | 97 | 2506 |
| 1315621 | N/A | N/A | 115130 | 115149 | GTAGAGTACATTAACCGCTA | 25 | 2507 |
| 1315705 | N/A | N/A | 106113 | 106132 | CATACGCTCACACATGAGCA | 104 | 2508 |
| | | | 106169 | 106188 | | | |
| 1315807 | N/A | N/A | 30080 | 30099 | GACACATCCCATCACTAGTT | 91 | 2509 |
| 1315881 | N/A | N/A | 117024 | 117043 | CTTATGACTTTCTTGGGTTC | 31 | 2510 |
| 1315940 | N/A | N/A | 48295 | 48314 | CTGTTTTCATTTCTCAGCAC | 48 | 2511 |
| 1315969 | N/A | N/A | 22845 | 22864 | TTCCTATAATATATTCCAAC | 91 | 2512 |
| 1315973 | N/A | N/A | 112574 | 112593 | GACACAATCATTACCAACAT | 79 | 2513 |
| 1316181 | N/A | N/A | 45684 | 45703 | AAATGGGTTCTCTTACTCTA | 86 | 2514 |
| 1316221 | N/A | N/A | 46788 | 46807 | GGCCATGGACCAATACCGCT | 87 | 2515 |
| 1316252 | N/A | N/A | 127923 | 127942 | ATCTTAATTTTACCTTTACA | 52 | 2516 |
| 1316300 | N/A | N/A | 142742 | 142761 | ATTGATTTCAATCCACACGG | 41 | 2517 |
| 1316308 | N/A | N/A | 86175 | 86194 | GTCAAATTCACATAGGGTTG | 38 | 2518 |
| 1316321 | N/A | N/A | 33474 | 33493 | CCAACAGTCCCTAATGGGAT | 97 | 2519 |
| 1316346 | N/A | N/A | 25822 | 25841 | GCACCTCCAAACCATACATC | 29 | 2520 |
| 1316360 | N/A | N/A | 147227 | 147246 | GTAATTTCTAAATCTGCAAC | 59 | 2521 |
| 1316384 | N/A | N/A | 15163 | 15182 | GAACAGAATCATACACAGTA | 104 | 2522 |
| 1316392 | N/A | N/A | 52277 | 52296 | AGGCAATTTTTCATCCCATA | 13 | 2523 |
| 1316414 | N/A | N/A | 69840 | 69859 | TAGTATATATTACCAGGTCA | 18 | 2524 |
| 1316554 | N/A | N/A | 118649 | 118668 | GGGTGACACCTATAACCTCA | 97 | 2525 |
| 1316557 | N/A | N/A | 82897 | 82916 | GCACTATATACAACTATTCT | 65 | 2526 |
| 1316577 | N/A | N/A | 130761 | 130780 | TTAGTTATTATTATTCCATT | 60 | 2527 |
| 1316602 | N/A | N/A | 64047 | 64066 | AGTCCATCTATACTATGACC | 57 | 2528 |
| 1316615 | N/A | N/A | 36873 | 36892 | CTCATACAATTTCCCTCCCA | 89 | 2529 |
| 1316617 | N/A | N/A | 108421 | 108440 | ACAAGGTGCACACTTTGCTC | 67 | 2530 |
| 1316663 | N/A | N/A | 3661 | 3680 | CTTACAATATGAACAGGTTA | 39 | 2531 |
| 1316671 | N/A | N/A | 11011 | 11030 | TGCTGTATTTTAATTGATCT | 48 | 2532 |
| 1316680 | N/A | N/A | 133368 | 133387 | TGTCAAGACCATACTTACGG | 53 | 2533 |
| 1316704 | N/A | N/A | 126604 | 126623 | CCAGAACCACATTTACTTTA | 29 | 2534 |
| 1316773 | N/A | N/A | 42351 | 42370 | ACATCTTAACATCTGACTCA | 98 | 2535 |
| 1316835 | N/A | N/A | 76958 | 76977 | GTACACACTTTCTTCTCGCA | 32 | 2536 |
| 1316859 | N/A | N/A | 10025 | 10044 | GTTTTATGACAAACTGCCAA | 69 | 2537 |
| 1316927 | N/A | N/A | 134843 | 134862 | TAGTTTACTTTTAAGTATCA | 79 | 2538 |
| 1316957 | N/A | N/A | 16526 | 16545 | GACTACATTTTCACAATATA | 57 | 2539 |
| 1316971 | N/A | N/A | 99789 | 99808 | GCCACACCACTCTACAGGTC | 59 | 2540 |
| 1316991 | N/A | N/A | 34182 | 34201 | AGGGTCACTATTTCTGGACA | 77 | 2541 |
| 1316997 | N/A | N/A | 50117 | 50136 | ACTAGCAGATTATATCACAA | 51 | 2542 |
| 1317066 | N/A | N/A | 52927 | 52946 | CATGTGAGCTTTATAGTATC | 73 | 2543 |
| 1317070 | N/A | N/A | 24015 | 24034 | AAGGAACTCATCCATTTCAT | 76 | 2544 |
| 1317076 | N/A | N/A | 80036 | 80055 | GGATCTCACACTATGATGCC | 81 | 2545 |
| 1317085 | N/A | N/A | 45194 | 45213 | TCATGGTAATTTAATTAAGA | 110 | 2546 |
| 1317123 | N/A | N/A | 54830 | 54849 | GATCTGTTTATAATAGGCTC | 34 | 2547 |
| 1317136 | 2962 | 2981 | 66826 | 66845 | GGTCACATTTATAAAACAGC | 13 | 2548 |
| 1317144 | N/A | N/A | 34680 | 34699 | CATGAAGAAATATTACACTA | 87 | 2549 |
| 1317152 | N/A | N/A | 101146 | 101165 | CTCCAGTTTCCTCTCTAGCA | 66 | 2550 |
| 1317214 | N/A | N/A | 152615 | 152634 | ACCCAGACCCTTGAATCCCT | 77 | 2551 |
| 1317237 | N/A | N/A | 71707 | 71726 | GGCATTCATTTCCCACAGCT | 48 | 2552 |

TABLE 35
Reduction of HTT RNA by 5-10-5 MOE gapmers with mixed PO/PS internucleoside
linkages in A431 cells

| | SEQ | SEQ | SEQ | SEQ | | | |
|---|---|---|---|---|---|---|---|
| | ID No: | ID No: | ID No: | ID No: | | HTT | SEQ |
| Compound | 1 Start | 1 Stop | 2 Start | 2 Stop | | (% | ID |
| Number | Site | Site | Site | Site | Sequence (5′ to 3′) | UTC) | NO |
| 388241 | 4862 | 4881 | 106917 | 106936 | CTCAGTAACATTGACACCAC | 33 | 858 |
| 1314512 | N/A | N/A | 164356 | 164375 | GACCAGAACTCCTAAGAGGA | 86 | 2553 |
| | | | 164418 | 164437 | | | |
| 1314534 | N/A | N/A | 13170 | 13189 | AGTTCTACACCTCATTCATT | 64 | 2554 |
| 1314597 | N/A | N/A | 71706 | 71725 | GCATTCATTTCCCACAGCTC | 75 | 2555 |
| 1314606 | 2961 | 2980 | 66825 | 66844 | GTCACATTTATAAAACAGCT | 35 | 2556 |
| 1314741 | N/A | N/A | 69821 | 69840 | ACTGAGTTAATTATAATCTA | 53 | 2557 |
| 1314743 | N/A | N/A | 42223 | 42242 | GCTACACACCCACATCCCTA | 84 | 2558 |
| 1314765 | N/A | N/A | 10656 | 10675 | TTTGGATGAACATTACCTCT | 60 | 2559 |
| 1314828 | N/A | N/A | 133367 | 133386 | GTCAAGACCATACTTACGGA | 27 | 2560 |
| 1314866 | N/A | N/A | 127922 | 127941 | TCTTAATTTTACCTTTACAT | 71 | 2561 |
| 1314914 | N/A | N/A | 17490 | 17509 | CTGTTTTAACATCCAATCAC | 89 | 2562 |
| 1314971 | N/A | N/A | 19765 | 19784 | ATACATGTCAATTTCTGCTC | 58 | 2563 |
| 1314998 | N/A | N/A | 110283 | 110302 | TCCCAACAAAATCTTCACTC | 104 | 2564 |
| 1315000 | N/A | N/A | 59375 | 59394 | GCATTAACTTTACTGGCAAC | 67 | 2565 |
| 1315028 | N/A | N/A | 45679 | 45698 | GGTTCTCTTACTCTAATCTA | 68 | 2566 |
| 1315043 | N/A | N/A | 60590 | 60609 | GTTCTGGGTTTAACTGCAAC | 53 | 2567 |
| 1315054 | N/A | N/A | 40932 | 40951 | ACATCCATTTCCCATTATTC | 55 | 2568 |
| 1315122 | N/A | N/A | 106965 | 106984 | ACGACAGTTCCAACATACAT | 90 | 2569 |
| 1315125 | N/A | N/A | 68748 | 68767 | AAGAAATTCCTTTCTCCACT | 68 | 2570 |
| 1315134 | N/A | N/A | 22843 | 22862 | CCTATAATATATTCCAACTT | 86 | 2571 |
| 1315139 | N/A | N/A | 56123 | 56142 | AGCACATTTTACACACAGAA | 48 | 2572 |
| 1315149 | N/A | N/A | 46787 | 46806 | GCCATGGACCAATACCGCTC | 87 | 2573 |
| 1315195 | N/A | N/A | 16525 | 16544 | ACTACATTTTCACAATATAC | 68 | 2574 |
| 1315276 | N/A | N/A | 130134 | 130153 | GTTATCTATTCCTAAGCTAC | 74 | 2575 |
| 1315286 | N/A | N/A | 52887 | 52906 | TTGTTGTTTAATTTGTGTAA | 53 | 2576 |
| 1315387 | N/A | N/A | 58079 | 58098 | TGTGAACTTTTAACATACCA | 94 | 2577 |
| 1315519 | N/A | N/A | 5984 | 6003 | AGTGACATCCCATCTCACTC | 93 | 2578 |
| 1315565 | N/A | N/A | 133841 | 133860 | CTGCCGGTCATCCTTTACTC | 106 | 2579 |
| 1315572 | N/A | N/A | 3562 | 3581 | AGGAAGATATTTTAATTATT | 100 | 2580 |
| 1315586 | N/A | N/A | 9989 | 10008 | GCCGTACTATATTATATTCC | 48 | 2581 |
| 1315638 | N/A | N/A | 22240 | 22259 | TTACTTTTCCATTCAATCTG | 86 | 2582 |
| 1315656 | N/A | N/A | 106112 | 106131 | ATACGCTCACACATGAGCAC | 98 | 2583 |
| | | | 106168 | 106187 | | | |
| 1315694 | N/A | N/A | 130757 | 130776 | TTATTATTATTCCATTGCTT | 36 | 2584 |
| 1315703 | N/A | N/A | 73557 | 73576 | CCATACATTATACTTTCTTA | 39 | 2585 |
| 1315746 | N/A | N/A | 54736 | 54755 | TAGCAGAGTTCATATAATCA | 27 | 2586 |
| 1315748 | N/A | N/A | 52266 | 52285 | CATCCCATAATTTTTCATCC | 82 | 2587 |
| 1315801 | N/A | N/A | 81063 | 81082 | CTACATCTATTCCTAAGCAT | 95 | 2588 |
| 1315820 | N/A | N/A | 7719 | 7738 | ACCAAAATAATCAAATACTA | 100 | 2589 |
| 1315828 | N/A | N/A | 15152 | 15171 | TACACAGTATTTCACAAACA | 90 | 2590 |
| 1315830 | N/A | N/A | 126602 | 126621 | AGAACCACATTTACTTTATA | 85 | 2591 |
| 1315919 | N/A | N/A | 120724 | 120743 | TCATCTGTTTCTAAACCAGT | 87 | 2592 |
| 1316007 | N/A | N/A | 44280 | 44299 | TTTACAATCCTTATCGACCA | 73 | 2593 |
| 1316026 | N/A | N/A | 25817 | 25836 | TCCAAACCATACATCAGAAA | 92 | 2594 |
| 1316037 | N/A | N/A | 76957 | 76976 | TACACACTTTCTTCTCGCAA | 38 | 2595 |
| 1316092 | N/A | N/A | 147001 | 147020 | CTGCTTGTTCCCATATGAGA | 59 | 2596 |
| 1316109 | N/A | N/A | 72786 | 72805 | AGCTACCCAGACATTTGGGC | 73 | 2597 |
| 1316352 | N/A | N/A | 99751 | 99770 | GGGACATTATGAACTGCATT | 49 | 2598 |
| 1316380 | N/A | N/A | 134816 | 134835 | TACTCCATTAATATTTTCCA | 56 | 2599 |
| 1316435 | N/A | N/A | 108398 | 108417 | AGGATTTGCCATCATTGTTA | 13 | 2600 |
| 1316455 | N/A | N/A | 116999 | 117018 | CCTTGTCATTTTCTTTCTCT | 54 | 2601 |
| 1316487 | N/A | N/A | 64027 | 64046 | CCAGTACTATAAAATGTCCA | 69 | 2602 |
| 1316539 | N/A | N/A | 45193 | 45212 | CATGGTAATTTAATTAAGAA | 86 | 2603 |
| 1316548 | N/A | N/A | 117906 | 117925 | TCTCTACCATCTACTTGCCA | 80 | 2604 |
| 1316580 | N/A | N/A | 50115 | 50134 | TAGCAGATTATATCACAAAC | 41 | 2605 |
| 1316593 | N/A | N/A | 34666 | 34685 | ACACTAAATTCTTTAGATTC | 91 | 2606 |
| 1316644 | N/A | N/A | 137553 | 137572 | ACTAAGCAAATTTATCACTC | 59 | 2607 |
| 1316693 | N/A | N/A | 112526 | 112545 | TTGTATACACATACATGGGA | 87 | 2608 |
| 1316741 | N/A | N/A | 142723 | 142742 | GTTGGCACTATTCTTATCCT | 42 | 2609 |
| 1316746 | N/A | N/A | 82891 | 82910 | TATACAACTATTCTACTTCA | 77 | 2610 |
| 1316753 | N/A | N/A | 118564 | 118583 | ACAGCAAGACTTCCATTTCT | 75 | 2611 |
| 1316788 | N/A | N/A | 18000 | 18019 | GCTTGAGTTTCTATAACAAA | 33 | 2612 |
| 1316797 | N/A | N/A | 97366 | 97385 | CTGTGAATCACTACTTGTCT | 93 | 2613 |
| 1316815 | N/A | N/A | 101118 | 101137 | CCTGAGTTCACATGCCACAA | 64 | 2614 |
| 1316837 | N/A | N/A | 24006 | 24025 | ATCCATTTCATCTATAAGTT | 57 | 2615 |
| 1316876 | N/A | N/A | 29886 | 29905 | TTTAACTTTCATTATCATCA | 67 | 2616 |
| 1316914 | N/A | N/A | 21994 | 22013 | CCTTATTACACCATTTCACA | 79 | 2617 |
| 1316915 | N/A | N/A | 33397 | 33416 | GGAGACATCCTTCATTTCTC | 100 | 2618 |
| 1316982 | N/A | N/A | 79921 | 79940 | GCAGCATTTTAAACTCCTGT | 63 | 2619 |
| 1316983 | N/A | N/A | 36872 | 36891 | TCATACAATTTCCCTCCCAT | 98 | 2620 |
| 1316989 | N/A | N/A | 34028 | 34047 | TGGCACAGTCATCTTCCCGC | 75 | 2621 |
| 1317009 | N/A | N/A | 2225 | 2244 | GCAAAAAACTTCAATCAACT | 69 | 2622 |
| 1317043 | N/A | N/A | 104537 | 104556 | TACATATCAATATAAGCAAC | 97 | 2623 |
| 1317060 | N/A | N/A | 152563 | 152582 | CCAATGTGACCTGCTAGGAA | 49 | 2624 |
| 1317127 | N/A | N/A | 86072 | 86091 | GCAATTCTATTTTACAGACT | 65 | 2625 |
| 1317151 | N/A | N/A | 19054 | 19073 | CAGAAGCAAAAATCTTTCAT | 79 | 2626 |
| 1317164 | N/A | N/A | 48293 | 48312 | GTTTTCATTTCTCAGCACCT | 32 | 2627 |
| 1317185 | N/A | N/A | 140549 | 140568 | CATATTTTATCTACCTCTCC | 81 | 2628 |
| 1317215 | N/A | N/A | 115085 | 115104 | GTGGACACAGTCACTTGGTC | 72 | 2629 |

TABLE 36
Reduction of HTT RNA by 5-10-5 MOE gapmers with mixed PO/PS internucleoside
linkages in A431 cells

| | SEQ | SEQ | SEQ | SEQ | | | |
|---|---|---|---|---|---|---|---|
| | ID No: | ID No: | ID No: | ID No: | | HTT | SEQ |
| Compound | 1 Start | 1 Stop | 2 Start | 2 Stop | | (% | ID |
| Number | Site | Site | Site | Site | Sequence (5′ to 3′) | UTC) | NO |
| 388241 | 4862 | 4881 | 106917 | 106936 | CTCAGTAACATTGACACCAC | 27 | 858 |
| 1314498 | N/A | N/A | 36856 | 36875 | CCATTCATCTTCTCTCAGGA | 80 | 2630 |
| 1314520 | 2960 | 2979 | 66824 | 66843 | TCACATTTATAAAACAGCTT | 74 | 2631 |
| 1314588 | N/A | N/A | 73550 | 73569 | TTATACTTTCTTAACATCCC | 101 | 2632 |
| 1314654 | N/A | N/A | 19764 | 19783 | TACATGTCAATTTCTGCTCT | 52 | 2633 |
| 1314679 | N/A | N/A | 22239 | 22258 | TACTTTTCCATTCAATCTGA | 87 | 2634 |
| 1314686 | N/A | N/A | 2218 | 2237 | ACTTCAATCAACTCTTCCTA | 72 | 2635 |
| 1314702 | N/A | N/A | 96631 | 96650 | GCATGGTACCTAATTATTCC | 89 | 2636 |
| 1314715 | N/A | N/A | 126551 | 126570 | ATGGAACCAATTTAAGGACT | 42 | 2637 |
| 1314749 | N/A | N/A | 116998 | 117017 | CTTGTCATTTTCTTTCTCTA | 34 | 2638 |
| 1314782 | N/A | N/A | 13166 | 13185 | CTACACCTCATTCATTCATT | 48 | 2639 |
| 1314829 | N/A | N/A | 9988 | 10007 | CCGTACTATATTATATTCCC | 16 | 2640 |
| 1314843 | N/A | N/A | 45191 | 45210 | TGGTAATTTAATTAAGAACA | 72 | 2641 |
| 1314883 | N/A | N/A | 52263 | 52282 | CCCATAATTTTTCATCCCAT | 65 | 2642 |
| 1315082 | N/A | N/A | 106077 | 106096 | CTCTGACCCCCTCAGTGACA | 93 | 2643 |
| | | | 106133 | 106152 | | | |
| 1315083 | N/A | N/A | 117878 | 117897 | TGGTTAGTTTTCCTTTTATA | 16 | 2644 |
| 1315186 | N/A | N/A | 151463 | 151482 | CCACTTAACCTTTCACACCC | 98 | 2645 |
| 1315246 | N/A | N/A | 106964 | 106983 | CGACAGTTCCAACATACATT | 82 | 2646 |
| 1315297 | N/A | N/A | 130028 | 130047 | AAGCTGCACATTCAATCAGC | 86 | 2647 |
| 1315299 | N/A | N/A | 134815 | 134834 | ACTCCATTAATATTTTCCAG | 43 | 2648 |
| 1315306 | N/A | N/A | 34658 | 34677 | TTCTTTAGATTCATCATCTC | 93 | 2649 |
| 1315398 | N/A | N/A | 72717 | 72736 | GGGTGAACTCTTTATTACTA | 54 | 2650 |
| 1315426 | N/A | N/A | 45673 | 45692 | CTTACTCTAATCTATTACTT | 94 | 2651 |
| 1315512 | N/A | N/A | 137549 | 137568 | AGCAAATTTATCACTCAGTA | 30 | 2652 |
| 1315531 | N/A | N/A | 147000 | 147019 | TGCTTGTTCCCATATGAGAA | 86 | 2653 |
| 1315632 | N/A | N/A | 120649 | 120668 | GACAGCTATCTTTCTTGGCT | 80 | 2654 |
| 1315634 | N/A | N/A | 56122 | 56141 | GCACATTTTACACACAGAAC | 39 | 2655 |
| 1315652 | N/A | N/A | 54734 | 54753 | GCAGAGTTCATATAATCAAC | 15 | 2656 |
| 1315728 | N/A | N/A | 33389 | 33408 | CCTTCATTTCTCTTATGATC | 96 | 2657 |
| 1315729 | N/A | N/A | 23967 | 23986 | AGTTGTTCATAATATTACCA | 44 | 2658 |
| 1315770 | N/A | N/A | 130720 | 130739 | ATACCCAGCATCATGTAGGC | 82 | 2659 |
| 1315774 | N/A | N/A | 115025 | 115044 | GTAGCATTTTTTTAAGCTTT | 98 | 2660 |
| 1315776 | N/A | N/A | 22832 | 22851 | TTCCAACTTAATGATACTGA | 52 | 2661 |
| 1315851 | N/A | N/A | 118316 | 118335 | GCATAAATATACAATGCAGA | 81 | 2662 |
| 1315856 | N/A | N/A | 104536 | 104555 | ACATATCAATATAAGCAACA | 94 | 2663 |
| 1315913 | N/A | N/A | 15151 | 15170 | ACACAGTATTTCACAAACAA | 83 | 2664 |
| 1315928 | N/A | N/A | 140531 | 140550 | CCATCCCCAATTCCTAGCTT | 90 | 2665 |
| 1315975 | N/A | N/A | 99585 | 99604 | GCCTTAAATCATCTTTGCAT | 77 | 2666 |
| 1316032 | N/A | N/A | 59295 | 59314 | GTGCATGGAAATATTTCCTA | 32 | 2667 |
| 1316036 | N/A | N/A | 34027 | 34046 | GGCACAGTCATCTTCCCGCA | 76 | 2668 |
| 1316041 | N/A | N/A | 69817 | 69836 | AGTTAATTATAATCTAGACA | 84 | 2669 |
| 1316089 | N/A | N/A | 44272 | 44291 | CCTTATCGACCAATTTTATT | 95 | 2670 |
| 1316103 | N/A | N/A | 17489 | 17508 | TGTTTTAACATCCAATCACT | 89 | 2671 |
| 1316122 | N/A | N/A | 57883 | 57902 | CAGATTGTTTTCAAATGAAC | 99 | 2672 |
| 1316128 | N/A | N/A | 133317 | 133336 | CTGCTAAATTTTCAATATAA | 81 | 2673 |
| 1316139 | N/A | N/A | 110282 | 110301 | CCCAACAAAATCTTCACTCC | 90 | 2674 |
| 1316204 | N/A | N/A | 48191 | 48210 | CCTGCTAAACTTTAATTCTC | 67 | 2675 |
| 1316233 | N/A | N/A | 46779 | 46798 | CCAATACCGCTCTGCAGCCT | 94 | 2676 |
| 1316236 | N/A | N/A | 79862 | 79881 | TTCAAGGTCACAGCTGGTTA | 62 | 2677 |
| 1316244 | N/A | N/A | 81062 | 81081 | TACATCTATTCCTAAGCATC | 103 | 2678 |
| 1316272 | N/A | N/A | 60568 | 60587 | GGATGTTGCATTTTTCCCAC | 91 | 2679 |
| 1316280 | N/A | N/A | 108373 | 108392 | ATAGAATTTGTAATATTTCA | 87 | 2680 |
| 1316351 | N/A | N/A | 68740 | 68759 | CCTTTCTCCACTTCTCATCT | 66 | 2681 |
| 1316394 | N/A | N/A | 17999 | 18018 | CTTGAGTTTCTATAACAAAA | 59 | 2682 |
| 1316443 | N/A | N/A | 40931 | 40950 | CATCCATTTCCCATTATTCA | 81 | 2683 |
| 1316452 | N/A | N/A | 101112 | 101131 | TTCACATGCCACAAACGGCA | 96 | 2684 |
| 1316499 | N/A | N/A | 64012 | 64031 | GTCCAGAAAATACAAATCTT | 33 | 2685 |
| 1316527 | N/A | N/A | 19042 | 19061 | TCTTTCATTATTTTTTAACT | 96 | 2686 |
| 1316532 | N/A | N/A | 142722 | 142741 | TTGGCACTATTCTTATCCTC | 48 | 2687 |
| 1316588 | N/A | N/A | 71644 | 71663 | TCCATCAGATATTTTTCCAA | 61 | 2688 |
| 1316599 | N/A | N/A | 7709 | 7728 | TCAAATACTATCTCATGACA | 84 | 2689 |
| 1316661 | N/A | N/A | 76568 | 76587 | TCTTCAGTCACACTAGCTGC | 99 | 2690 |
| 1316684 | N/A | N/A | 42098 | 42117 | CCACAGTTACCCAAACAACA | 74 | 2691 |
| 1316696 | N/A | N/A | 16507 | 16526 | ACATGAAGTTTTAAATGACT | 86 | 2692 |
| 1316784 | N/A | N/A | 10652 | 10671 | GATGAACATTACCTCTGGTT | 70 | 2693 |
| 1316846 | N/A | N/A | 133837 | 133856 | CGGTCATCCTTTACTCTTTA | 29 | 2694 |
| 1316910 | N/A | N/A | 5983 | 6002 | GTGACATCCCATCTCACTCA | 82 | 2695 |
| 1316916 | N/A | N/A | 50114 | 50133 | AGCAGATTATATCACAAACA | 37 | 2696 |
| 1316990 | N/A | N/A | 85103 | 85122 | CGGCATTTTTCAACATGCCG | 88 | 2697 |
| 1317013 | N/A | N/A | 162972 | 162991 | GTGTGGGTTCCACCTTCATC | 93 | 2698 |
| 1317049 | N/A | N/A | 21990 | 22009 | ATTACACCATTICACATGCA | 68 | 2699 |
| 1317051 | N/A | N/A | 3561 | 3580 | GGAAGATATTTTAATTATTG | 106 | 2700 |
| 1317093 | N/A | N/A | 127916 | 127935 | TTTTACCTTTACATTACCAT | 57 | 2701 |
| 1317114 | N/A | N/A | 25790 | 25809 | AGTGCAGACATCCTCAGGGA | 70 | 2702 |
| 1317126 | N/A | N/A | 112329 | 112348 | TCTGCTCTTCTCACTTAACC | 78 | 2703 |
| 1317183 | N/A | N/A | 82889 | 82908 | TACAACTATTCTACTTCAGT | 71 | 2704 |
| 1317199 | N/A | N/A | 52844 | 52863 | TTGTAAATAAATAATTACTA | 99 | 2705 |
| 1317202 | N/A | N/A | 28970 | 28989 | GTCGATGATCTCTTTAACCG | 59 | 2706 |

TABLE 37
Reduction of HTT RNA by 5-10-5 MOE gapmers with mixed PO/PS internucleoside
linkages in A431 cells

| | SEQ | SEQ | SEQ | SEQ | | | |
|---|---|---|---|---|---|---|---|
| | ID No: | ID No: | ID No: | ID No: | | HTT | SEQ |
| Compound | 1 Start | 1 Stop | 2 Start | 2 Stop | | (% | ID |
| Number | Site | Site | Site | Site | Sequence (5′ to 3′) | UTC) | NO |
| 388241 | 4862 | 4881 | 106917 | 106936 | CTCAGTAACATTGACACCAC | 34 | 858 |
| 1314494 | N/A | N/A | 5982 | 6001 | TGACATCCCATCTCACTCAC | 75 | 2707 |
| 1314510 | N/A | N/A | 46703 | 46722 | TGCTATATCACATTATATGA | 111 | 2708 |
| 1314524 | N/A | N/A | 105990 | 106009 | TGAGCACACACACAGAGGCA | 97 | 2709 |
| | | | 106099 | 106118 | | | |
| | | | 106155 | 106174 | | | |
| 1314546 | N/A | N/A | 126550 | 126569 | TGGAACCAATTTAAGGACTA | 59 | 2710 |
| 1314568 | N/A | N/A | 10484 | 10503 | GACAAAGCATTTCCATTACA | 52 | 2711 |
| 1314593 | N/A | N/A | 127890 | 127909 | ACGATATTTTTTGAAATTTA | 108 | 2712 |
| 1314656 | N/A | N/A | 110281 | 110300 | CCAACAAAATCTTCACTCCA | 102 | 2713 |
| 1314678 | N/A | N/A | 45120 | 45139 | CTAGAGTTTAGAATTTGCCA | 35 | 2714 |
| 1314716 | N/A | N/A | 63588 | 63607 | TTGGAGTTTACTATACACTC | 49 | 2715 |
| 1314717 | N/A | N/A | 120586 | 120605 | TGGGATGAATACCCTCCTCT | 108 | 2716 |
| 1314736 | N/A | N/A | 130027 | 130046 | AGCTGCACATTCAATCAGCA | 94 | 2717 |
| 1314858 | N/A | N/A | 60564 | 60583 | GTTGCATTTTTCCCACACCT | 85 | 2718 |
| 1314895 | N/A | N/A | 82847 | 82866 | CCTTAGTTTATTTAATTCAT | 79 | 2719 |
| 1314897 | N/A | N/A | 137088 | 137107 | AGGTCTCTTTTCATGAACAC | 127 | 2720 |
| 1314935 | N/A | N/A | 3558 | 3577 | AGATATTTTAATTATTGCCC | 18 | 2721 |
| 1314958 | N/A | N/A | 99569 | 99588 | GCATCAACCATATATATCTC | 50 | 2722 |
| 1314974 | N/A | N/A | 84856 | 84875 | GCTATGTGAAATAATCTTTA | 79 | 2723 |
| 1315001 | N/A | N/A | 52262 | 52281 | CCATAATTTTTCATCCCATT | 83 | 2724 |
| 1315037 | N/A | N/A | 19763 | 19782 | ACATGTCAATTTCTGCTCTT | 62 | 2725 |
| 1315084 | N/A | N/A | 104523 | 104542 | AGCAACATAAAATAATTCAT | 101 | 2726 |
| 1315109 | N/A | N/A | 48189 | 48208 | TGCTAAACTTTAATTCTCTT | 57 | 2727 |
| 1315129 | N/A | N/A | 22238 | 22257 | ACTTTTCCATTCAATCTGAA | 92 | 2728 |
| 1315165 | N/A | N/A | 116994 | 117013 | TCATTTTCTTTCTCTAGAGA | 84 | 2729 |
| 1315183 | N/A | N/A | 79817 | 79836 | CCAGATGTATTCATAAAGCC | 82 | 2730 |
| 1315247 | N/A | N/A | 101095 | 101114 | GCACCATTTACCTTATCTGC | 103 | 2731 |
| 1315271 | N/A | N/A | 44267 | 44286 | TCGACCAATTTTATTTAGAT | 84 | 2732 |
| 1315287 | N/A | N/A | 21988 | 22007 | TACACCATTTCACATGCAGC | 54 | 2733 |
| 1315309 | N/A | N/A | 142721 | 142740 | TGGCACTATTCTTATCCTCA | 33 | 2734 |
| 1315334 | N/A | N/A | 45669 | 45688 | CTCTAATCTATTACTTGCTT | 84 | 2735 |
| 1315347 | N/A | N/A | 9987 | 10006 | CGTACTATATTATATTCCCA | 17 | 2736 |
| 1315350 | N/A | N/A | 40929 | 40948 | TCCATTTCCCATTATTCAAA | 61 | 2737 |
| 1315354 | N/A | N/A | 134798 | 134817 | CAGAAATTTCATTTATACTC | 96 | 2738 |
| 1315372 | N/A | N/A | 34657 | 34676 | TCTTTAGATTCATCATCTCC | 106 | 2739 |
| 1315406 | 3283 | 3302 | N/A | N/A | GAGGCACTCCACAGTGCCAA | 118 | 2740 |
| 1315423 | N/A | N/A | 56102 | 56121 | ACAAATGTACTCATCTGTCA | 64 | 2741 |
| 1315471 | N/A | N/A | 81061 | 81080 | ACATCTATTCCTAAGCATCT | 99 | 2742 |
| 1315499 | N/A | N/A | 23965 | 23984 | TTGTTCATAATATTACCATA | 44 | 2743 |
| 1315501 | N/A | N/A | 133790 | 133809 | TAGGAAGGTTCTATTATGGC | 19 | 2744 |
| 1315584 | N/A | N/A | 72713 | 72732 | GAACTCTTTATTACTATGGA | 36 | 2745 |
| 1315627 | N/A | N/A | 133292 | 133311 | TATCAGGGTTTCTCTTCCCA | 64 | 2746 |
| 1315738 | N/A | N/A | 28780 | 28799 | CTGAAAGTCCTTAAATGAGC | 87 | 2747 |
| 1315816 | N/A | N/A | 68737 | 68756 | TTCTCCACTTCTCATCTCCC | 78 | 2748 |
| 1315855 | N/A | N/A | 19039 | 19058 | TTCATTATTTTTTAACTGAA | 102 | 2749 |
| 1315885 | N/A | N/A | 69805 | 69824 | TCTAGACATTTTAAACTTCT | 34 | 2750 |
| 1315932 | N/A | N/A | 75570 | 75589 | CTGGTCTATCTTAAATCCAT | 95 | 2751 |
| 1315951 | N/A | N/A | 96506 | 96525 | ATGTAACTCAACTAACCTCA | 111 | 2752 |
| 1316042 | N/A | N/A | 112322 | 112341 | TTCTCACTTAACCCAGTGCA | 102 | 2753 |
| 1316058 | N/A | N/A | 151461 | 151480 | ACTTAACCTTTCACACCCCC | 95 | 2754 |
| 1316101 | N/A | N/A | 146784 | 146803 | AACTGGGATCTATTTTCTCA | 88 | 2755 |
| 1316113 | N/A | N/A | 15149 | 15168 | ACAGTATTTCACAAACAACA | 90 | 2756 |
| 1316163 | N/A | N/A | 42077 | 42096 | GAGAAACTGTCAACTGACCT | 99 | 2757 |
| 1316198 | N/A | N/A | 16506 | 16525 | CATGAAGTTTTAAATGACTT | 97 | 2758 |
| 1316203 | N/A | N/A | 59273 | 59292 | AAGCTCCAATTTTAATTGTA | 85 | 2759 |
| 1316330 | N/A | N/A | 108367 | 108386 | TTTGTAATATTTCACAATCA | 82 | 2760 |
| 1316339 | N/A | N/A | 118298 | 118317 | GACCACAGAATTACAACACT | 72 | 2761 |
| 1316342 | N/A | N/A | 13139 | 13158 | TGTTTCTCGACTACTATGAA | 49 | 2762 |
| 1316368 | N/A | N/A | 17488 | 17507 | GTTTTAACATCCAATCACTA | 91 | 2763 |
| 1316409 | N/A | N/A | 7678 | 7697 | TATGAAATTCAAACTTCCTT | 69 | 2764 |
| 1316473 | N/A | N/A | 162971 | 162990 | TGTGGGTTCCACCTTCATCC | 101 | 2765 |
| 1316482 | N/A | N/A | 32882 | 32901 | GAATCTCTATCTAAACGGCA | 75 | 2766 |
| 1316507 | N/A | N/A | 115000 | 115019 | CTGTACACCATTACACAAAT | 64 | 2767 |
| 1316608 | N/A | N/A | 33981 | 34000 | GCCGAAAACAAATCTGCTCT | 99 | 2768 |
| 1316627 | N/A | N/A | 2206 | 2225 | TCTTCCTAATATTTAAGATA | 98 | 2769 |
| 1316639 | N/A | N/A | 117877 | 117896 | GGTTAGTTTTCCTTTTATAT | 14 | 2770 |
| 1316660 | N/A | N/A | 50083 | 50102 | GTTAAGTTTTATCAGAACAT | 63 | 2771 |
| 1316706 | N/A | N/A | 130685 | 130704 | GGCATTTGATAAATGAGTCA | 92 | 2772 |
| 1316715 | N/A | N/A | 22814 | 22833 | GAGGTCAGAAAACATACTCT | 97 | 2773 |
| 1316820 | N/A | N/A | 25694 | 25713 | CACACGGTTCTTACTTTGAT | 96 | 2774 |
| 1316828 | N/A | N/A | 106963 | 106982 | GACAGTTCCAACATACATTC | 106 | 2775 |
| 1316831 | N/A | N/A | 54715 | 54734 | CTATTCCAATTTTTTACCTC | 74 | 2776 |
| 1316870 | N/A | N/A | 17963 | 17982 | GGTGGTTTAAACAATAAGCA | 83 | 2777 |
| 1316888 | N/A | N/A | 36777 | 36796 | TGCAAAGGAAATTCCAGGCT | 85 | 2778 |
| 1316918 | N/A | N/A | 140495 | 140514 | GCAGCACAAAATAAAAACAT | 68 | 2779 |
| 1316924 | N/A | N/A | 66757 | 66776 | GATGAAACTCACCTGTGATA | 109 | 2780 |
| 1316958 | N/A | N/A | 73440 | 73459 | GAGGCTACTTTAAAATACTC | 93 | 2781 |
| 1317068 | N/A | N/A | 52828 | 52847 | ACTACTAGAATTATTCAGAT | 64 | 2782 |
| 1317169 | N/A | N/A | 57835 | 57854 | CCATCATTTCCTCCCTCCCC | 84 | 2783 |

TABLE 38
Reduction of HTT RNA by 5-10-5 MOE gapmers with mixed PO/PS internucleoside
linkages in A431 cells

| | SEQ | SEQ | SEQ | SEQ | | | |
|---|---|---|---|---|---|---|---|
| | ID No: | ID No: | ID No: | ID No: | | HTT | SEQ |
| Compound | 1 Start | 1 Stop | 2 Start | 2 Stop | | (% | ID |
| Number | Site | Site | Site | Site | Sequence (5′ to 3′) | UTC) | NO |
| 388241 | 4862 | 4881 | 106917 | 106936 | CTCAGTAACATTGACACCAC | 36 | 858 |
| 1314496 | N/A | N/A | 60563 | 60582 | TTGCATTTTTCCCACACCTC | 75 | 2784 |
| 1314511 | 4387 | 4406 | N/A | N/A | GAATAGCATTCTTATCTGCA | 27 | 2785 |
| 1314540 | N/A | N/A | 117872 | 117891 | GTTTTCCTTTTATATTCATC | 27 | 2786 |
| 1314655 | N/A | N/A | 17887 | 17906 | ACAGTGTTTTTCTTAACGAT | 105 | 2787 |
| 1314722 | N/A | N/A | 28751 | 28770 | TGGACAAACATTTATTTCAA | 52 | 2788 |
| 1314725 | N/A | N/A | 19732 | 19751 | GCTATTGTCATACAATTCAC | 51 | 2789 |
| 1314729 | N/A | N/A | 3557 | 3576 | GATATTTTAATTATTGCCCT | 33 | 2790 |
| 1314737 | N/A | N/A | 44266 | 44285 | CGACCAATTTTATTTAGATG | 67 | 2791 |
| 1314750 | N/A | N/A | 45089 | 45108 | TGCCACATCATTTATTTACT | 57 | 2792 |
| 1314771 | N/A | N/A | 21987 | 22006 | ACACCATTTCACATGCAGCA | 41 | 2793 |
| 1314787 | N/A | N/A | 52817 | 52836 | TATTCAGATTTTCCTCTCTA | 75 | 2794 |
| 1314792 | N/A | N/A | 33954 | 33973 | TGCCTTTTCAATTTGCATCT | 84 | 2795 |
| 1314814 | N/A | N/A | 34656 | 34675 | CTTTAGATTCATCATCTCCC | 78 | 2796 |
| 1314949 | N/A | N/A | 130026 | 130045 | GCTGCACATTCAATCAGCAC | 91 | 2797 |
| 1315045 | N/A | N/A | 134790 | 134809 | TCATTTATACTCAAACACTG | 91 | 2798 |
| 1315103 | N/A | N/A | 56092 | 56111 | TCATCTGTCATTTATTTCAA | 64 | 2799 |
| 1315118 | N/A | N/A | 106079 | 106098 | CACTCTGACCCCCTCAGTGA | 93 | 2800 |
| | | | 106135 | 106154 | | | |
| 1315136 | N/A | N/A | 72712 | 72731 | AACTCTTTATTACTATGGAA | 64 | 2801 |
| 1315187 | N/A | N/A | 57728 | 57747 | ACCTAGTTATTTCCTTCAAC | 64 | 2802 |
| 1315349 | N/A | N/A | 46702 | 46721 | GCTATATCACATTATATGAA | 63 | 2803 |
| 1315530 | N/A | N/A | 22813 | 22832 | AGGTCAGAAAACATACTCTG | 63 | 2804 |
| 1315537 | N/A | N/A | 126509 | 126528 | GCATGACAAGCATATCCCAC | 26 | 2805 |
| 1315683 | N/A | N/A | 23559 | 23578 | TCACTGTTTTTCCTATCAGC | 74 | 2806 |
| 1315699 | N/A | N/A | 120346 | 120365 | GATGAATTATTTCAACTCTT | 49 | 2807 |
| 1315716 | N/A | N/A | 19038 | 19057 | TCATTATTTTTTAACTGAAT | 100 | 2808 |
| 1315762 | N/A | N/A | 15059 | 15078 | GGCATTAAAAATAAGCAGAT | 76 | 2809 |
| 1315768 | N/A | N/A | 146737 | 146756 | AAAATGTATTCACATAGGTT | 109 | 2810 |
| 1315825 | N/A | N/A | 130654 | 130673 | TCTCACAGTCCAACTTAGAA | 74 | 2811 |
| 1315925 | N/A | N/A | 50053 | 50072 | ACAAAGTTAAATATGGCTGA | 101 | 2812 |
| 1315945 | N/A | N/A | 108325 | 108344 | TCAAATGTATATTAATCTTT | 117 | 2813 |
| 1315950 | N/A | N/A | 69804 | 69823 | CTAGACATTTTAAACTTCTG | 14 | 2814 |
| 1315961 | N/A | N/A | 66744 | 66763 | TGTGATAGACCACCCTCCTC | 96 | 2815 |
| 1315976 | N/A | N/A | 118297 | 118316 | ACCACAGAATTACAACACTA | 79 | 2816 |
| 1316013 | N/A | N/A | 63188 | 63207 | GGTAACTCAACTTCCAGGAA | 36 | 2817 |
| 1316053 | 3221 | 3240 | 71459 | 71478 | CACAAAGCTTCACAGCATCC | 63 | 2818 |
| 1316097 | N/A | N/A | 84837 | 84856 | AAGTTTTTTTTAAAATCCTT | 123 | 2819 |
| 1316146 | N/A | N/A | 114996 | 115015 | ACACCATTACACAAATACAA | 66 | 2820 |
| 1316160 | N/A | N/A | 79816 | 79835 | CAGATGTATTCATAAAGCCT | 61 | 2821 |
| 1316165 | N/A | N/A | 2191 | 2210 | AGATAATTTCATTAATCACC | 91 | 2822 |
| 1316192 | N/A | N/A | 99562 | 99581 | CCATATATATCTCCTAGAGT | 63 | 2823 |
| 1316249 | N/A | N/A | 68736 | 68755 | TCTCCACTTCTCATCTCCCA | 78 | 2824 |
| 1316322 | N/A | N/A | 160915 | 160934 | CCACGCACCATTTCTACCTG | 99 | 2825 |
| 1316359 | N/A | N/A | 127864 | 127883 | AGGTTAAAAATCCATTGATC | 39 | 2826 |
| 1316362 | N/A | N/A | 81060 | 81079 | CATCTATTCCTAAGCATCTA | 93 | 2827 |
| 1316400 | N/A | N/A | 82783 | 82802 | GCTGAGGCTTTTCAACAGGT | 23 | 2828 |
| 1316424 | N/A | N/A | 32823 | 32842 | AGACCCAGTTATATTCTTTA | 80 | 2829 |
| 1316440 | N/A | N/A | 42037 | 42056 | CGAGGCACAGTCTCAAGCCT | 71 | 2830 |
| 1316449 | N/A | N/A | 140095 | 140114 | GCTCCATTACATTCAGTCCT | 44 | 2831 |
| 1316485 | N/A | N/A | 75566 | 75585 | TCTATCTTAAATCCATTGTA | 69 | 2832 |
| 1316491 | N/A | N/A | 73436 | 73455 | CTACTTTAAAATACTCAGCA | 59 | 2833 |
| 1316517 | N/A | N/A | 96461 | 96480 | GAACACAAAAATATATAGCA | 96 | 2834 |
| 1316525 | N/A | N/A | 45655 | 45674 | TTGCTTAAAATTTATTCTGC | 94 | 2835 |
| 1316549 | N/A | N/A | 36069 | 36088 | GGTACAGTCACCAACTTCAT | 67 | 2836 |
| 1316592 | N/A | N/A | 133291 | 133310 | ATCAGGGTTTCTCTTCCCAA | 72 | 2837 |
| 1316619 | N/A | N/A | 25570 | 25589 | CTGGAGAATTTCTAAGCAAA | 104 | 2838 |
| 1316621 | N/A | N/A | 54712 | 54731 | TTCCAATTTTTTACCTCAGT | 20 | 2839 |
| 1316672 | N/A | N/A | 48188 | 48207 | GCTAAACTTTAATTCTCTTA | 25 | 2840 |
| 1316733 | N/A | N/A | 22226 | 22245 | AATCTGAAAAATCGCTGCCT | 75 | 2841 |
| 1316735 | N/A | N/A | 40928 | 40947 | CCATTTCCCATTATTCAAAA | 59 | 2842 |
| 1316751 | N/A | N/A | 104489 | 104508 | AGCAAGCACACATCAAGCTA | 107 | 2843 |
| 1316766 | N/A | N/A | 133788 | 133807 | GGAAGGTTCTATTATGGCAC | 25 | 2844 |
| 1316783 | N/A | N/A | 116993 | 117012 | CATTTTCTTTCTCTAGAGAC | 78 | 2845 |
| 1316825 | N/A | N/A | 7660 | 7679 | TTGTCATTAATAAAATTCTA | 104 | 2846 |
| 1316826 | N/A | N/A | 10483 | 10502 | ACAAAGCATTTCCATTACAA | 57 | 2847 |
| 1316829 | N/A | N/A | 16503 | 16522 | GAAGTTTTAAATGACTTCCT | 78 | 2848 |
| 1316847 | N/A | N/A | 106962 | 106981 | ACAGTTCCAACATACATTCC | 121 | 2849 |
| 1316867 | N/A | N/A | 142717 | 142736 | ACTATTCTTATCCTCACCAC | 83 | 2850 |
| 1316906 | N/A | N/A | 17485 | 17504 | TTAACATCCAATCACTATTT | 85 | 2851 |
| 1316936 | N/A | N/A | 13061 | 13080 | CACGAGTTCACCAATGGCTG | 42 | 2852 |
| 1316961 | N/A | N/A | 137081 | 137100 | TTTTCATGAACACCTGCCGT | 101 | 2853 |
| 1316969 | N/A | N/A | 110180 | 110199 | TCTGAATGCAACATGCACCT | 92 | 2854 |
| 1317014 | 1497 | 1516 | 51878 | 51897 | AGAGTCATCCTCCAAGGCTT | 73 | 2855 |
| 1317016 | N/A | N/A | 59269 | 59288 | TCCAATTTTAATTGTAGCAA | 78 | 2856 |
| 1317017 | N/A | N/A | 9986 | 10005 | GTACTATATTATATTCCCAC | 19 | 2857 |
| 1317150 | N/A | N/A | 151420 | 151439 | TCATGTCTTTCTGCTGGGCA | 86 | 2858 |
| 1317203 | N/A | N/A | 5976 | 5995 | CCCATCTCACTCACATAAAT | 85 | 2859 |
| 1317217 | N/A | N/A | 112229 | 112248 | TCCATTTATTTCCTTCCTTC | 63 | 2860 |

TABLE 39
Reduction of HTT RNA by 5-10-5 MOE gapmers with mixed PO/PS internucleoside
linkages in A431 cells

| | SEQ | SEQ | SEQ | SEQ | | | |
|---|---|---|---|---|---|---|---|
| | ID No: | ID No: | ID No: | ID No: | | HTT | SEQ |
| Compound | 1 Start | 1 Stop | 2 Start | 2 Stop | | (% | ID |
| Number | Site | Site | Site | Site | Sequence (5′ to 3′) | UTC) | NO |
| 388241 | 4862 | 4881 | 106917 | 106936 | CTCAGTAACATTGACACCAC | 31 | 858 |
| 1314480 | N/A | N/A | 57724 | 57743 | AGTTATTTCCTTCAACTGTG | 94 | 2861 |
| 1314505 | N/A | N/A | 23557 | 23576 | ACTGTTTTTCCTATCAGCTT | 91 | 2862 |
| 1314517 | N/A | N/A | 133767 | 133786 | TCTGCAGTAAACCCACCTAT | 74 | 2863 |
| 1314559 | N/A | N/A | 33940 | 33959 | GCATCTAGAAACCATCTCCC | 79 | 2864 |
| 1314603 | N/A | N/A | 114949 | 114968 | GTATCATCAATTTTAGCCAG | 26 | 2865 |
| 1314609 | N/A | N/A | 75525 | 75544 | GAAGTTGATTTTATTGCTTC | 88 | 2866 |
| 1314699 | N/A | N/A | 60561 | 60580 | GCATTTTTCCCACACCTCTC | 92 | 2867 |
| 1314721 | N/A | N/A | 22797 | 22816 | TCTGAATAATTTGAATGCTT | 57 | 2868 |
| 1314818 | N/A | N/A | 16464 | 16483 | CTGCCATTTATATAACCTCA | 48 | 2869 |
| 1314925 | N/A | N/A | 56088 | 56107 | CTGTCATTTATTTCAAGGCA | 76 | 2870 |
| 1314965 | N/A | N/A | 45088 | 45107 | GCCACATCATTTATTTACTT | 67 | 2871 |
| 1315005 | N/A | N/A | 116695 | 116714 | CCTCCAAATTTAACACAGGA | 85 | 2872 |
| 1315008 | N/A | N/A | 106078 | 106097 | ACTCTGACCCCCTCAGTGAC | 117 | 2873 |
| | | | 106134 | 106153 | | | |
| 1315049 | N/A | N/A | 106961 | 106980 | CAGTTCCAACATACATTCCT | 92 | 2874 |
| 1315053 | N/A | N/A | 46701 | 46720 | CTATATCACATTATATGAAC | 92 | 2875 |
| 1315071 | N/A | N/A | 111916 | 111935 | CAGAACATTTTTAATCATGC | 65 | 2876 |
| 1315102 | N/A | N/A | 104488 | 104507 | GCAAGCACACATCAAGCTAA | 115 | 2877 |
| 1315163 | N/A | N/A | 40921 | 40940 | CCATTATTCAAAACTATGCT | 94 | 2878 |
| 1315206 | N/A | N/A | 45654 | 45673 | TGCTTAAAATTTATTCTGCA | 73 | 2879 |
| 1315219 | N/A | N/A | 130024 | 130043 | TGCACATTCAATCAGCACCT | 63 | 2880 |
| 1315236 | N/A | N/A | 137043 | 137062 | GCATTTGTCCTCCCAGGTGC | 102 | 2881 |
| 1315275 | N/A | N/A | 52806 | 52825 | TCCTCTCTAAATATTTAAGT | 96 | 2882 |
| 1315317 | N/A | N/A | 126438 | 126457 | AACTGCTATTTTGAATGCCT | 13 | 2883 |
| 1315365 | N/A | N/A | 110117 | 110136 | TGTTGTATCACACAATTTCC | 90 | 2884 |
| 1315367 | 2633 | 2652 | N/A | N/A | ACACAGTTCCTCACAGCTGT | 100 | 2885 |
| 1315408 | N/A | N/A | 130589 | 130608 | GCAGAAGTAAACATTCATTC | 23 | 2886 |
| 1315412 | N/A | N/A | 69803 | 69822 | TAGACATTTTAAACTTCTGA | 29 | 2887 |
| 1315419 | 1487 | 1506 | 51868 | 51887 | TCCAAGGCTTCTTCTTCTCC | 60 | 2888 |
| 1315421 | N/A | N/A | 44183 | 44202 | GTTTAATATTTTCAGGTCTA | 37 | 2889 |
| 1315536 | N/A | N/A | 108320 | 108339 | TGTATATTAATCTTTGGCAA | 25 | 2890 |
| 1315563 | N/A | N/A | 101094 | 101113 | CACCATTTACCTTATCTGCA | 107 | 2891 |
| 1315592 | N/A | N/A | 96457 | 96476 | ACAAAAATATATAGCATCCA | 86 | 2892 |
| 1315600 | N/A | N/A | 21986 | 22005 | CACCATTTCACATGCAGCAT | 46 | 2893 |
| 1315606 | N/A | N/A | 22191 | 22210 | CTTTTTGACATAGTTAGGTT | 69 | 2894 |
| 1315647 | N/A | N/A | 14985 | 15004 | GCAGTTACACTCATACAGAC | 129 | 2895 |
| 1315653 | N/A | N/A | 19026 | 19045 | AACTGAATTTTTTAACACAT | 82 | 2896 |
| 1315777 | N/A | N/A | 28750 | 28769 | GGACAAACATTTATTTCAAC | 33 | 2897 |
| 1315792 | N/A | N/A | 32819 | 32838 | CCAGTTATATTCTTTAAGGT | 88 | 2898 |
| 1315794 | N/A | N/A | 3516 | 3535 | TCATGTCAATGTATTACTTA | 29 | 2899 |
| 1315887 | N/A | N/A | 42028 | 42047 | GTCTCAAGCCTACAAGACTC | 112 | 2900 |
| 1315903 | N/A | N/A | 36062 | 36081 | TCACCAACTTCATCTGTCCT | 94 | 2901 |
| 1315908 | N/A | N/A | 84823 | 84842 | ATCCTTTAAATTTCATGTGC | 50 | 2902 |
| 1315917 | N/A | N/A | 19731 | 19750 | CTATTGTCATACAATTCACT | 76 | 2903 |
| 1315958 | N/A | N/A | 160912 | 160931 | CGCACCATTTCTACCTGGAT | 104 | 2904 |
| 1315967 | N/A | N/A | 17482 | 17501 | ACATCCAATCACTATTTTAA | 84 | 2905 |
| 1316162 | N/A | N/A | 127448 | 127467 | ACAGTCACAGAATTTACCTA | 30 | 2906 |
| 1316283 | N/A | N/A | 120223 | 120242 | CACACACAACTTACTTGCAA | 65 | 2907 |
| 1316302 | N/A | N/A | 118229 | 118248 | CCAACACATTCTTTCTCTTA | 71 | 2908 |
| 1316432 | N/A | N/A | 17886 | 17905 | CAGTGTTTTTCTTAACGATA | 100 | 2909 |
| 1316434 | N/A | N/A | 66632 | 66651 | TTGTCTCCAATCTCAGGGTC | 70 | 2910 |
| 1316437 | N/A | N/A | 134780 | 134799 | TCAAACACTGCAACAGGCAA | 90 | 2911 |
| 1316472 | N/A | N/A | 139710 | 139729 | TATAAAGTATTTCATCCTGC | 101 | 2912 |
| 1316504 | N/A | N/A | 34632 | 34651 | TCATTCCAAAACCCCATGAC | 105 | 2913 |
| 1316575 | N/A | N/A | 10480 | 10499 | AAGCATTTCCATTACAAGTA | 41 | 2914 |
| 1316635 | N/A | N/A | 68733 | 68752 | CCACTTCTCATCTCCCACGG | 59 | 2915 |
| 1316648 | N/A | N/A | 117871 | 117890 | TTTTCCTTTTATATTCATCA | 48 | 2916 |
| 1316745 | N/A | N/A | 9984 | 10003 | ACTATATTATATTCCCACCA | 33 | 2917 |
| 1316775 | N/A | N/A | 49694 | 49713 | ACAACACATTCCCTAAGGCA | 30 | 2918 |
| 1316779 | N/A | N/A | 25218 | 25237 | GCAATTCTCATTTTTCTTTT | 38 | 2919 |
| 1316792 | N/A | N/A | 72711 | 72730 | ACTCTTTATTACTATGGAAA | 63 | 2920 |
| 1316807 | N/A | N/A | 2190 | 2209 | GATAATTTCATTAATCACCA | 51 | 2921 |
| 1316844 | N/A | N/A | 81053 | 81072 | TCCTAAGCATCTACACCACT | 88 | 2922 |
| 1316866 | N/A | N/A | 54638 | 54657 | CAAGCTCTCCATTAATGATC | 63 | 2923 |
| 1316908 | N/A | N/A | 150725 | 150744 | TGGTTGAGTTCTTAACATAA | 27 | 2924 |
| 1316932 | N/A | N/A | 79800 | 79819 | GCCTCAACTATCTCCAATAC | 103 | 2925 |
| 1316967 | N/A | N/A | 142716 | 142735 | CTATTCTTATCCTCACCACA | 82 | 2926 |
| 1317007 | N/A | N/A | 73356 | 73375 | GGGACAAGCCATCACTGGCA | 117 | 2927 |
| 1317025 | N/A | N/A | 71392 | 71411 | GTTTATTGAATTATATCTCC | 87 | 2928 |
| 1317031 | N/A | N/A | 82782 | 82801 | CTGAGGCTTTTCAACAGGTC | 20 | 2929 |
| 1317033 | N/A | N/A | 99492 | 99511 | TTATTCTTTTACAAAGTATT | 95 | 2930 |
| 1317034 | N/A | N/A | 63187 | 63206 | GTAACTCAACTTCCAGGAAT | 89 | 2931 |
| 1317050 | N/A | N/A | 13000 | 13019 | AAGCAGTTCATTTCCCCCAT | 29 | 2932 |
| 1317080 | N/A | N/A | 5973 | 5992 | ATCTCACTCACATAAATGCC | 92 | 2933 |
| 1317159 | 6194 | 6213 | 133255 | 133274 | GCCAGAAGCATTTCTACCCG | 85 | 2934 |
| 1317192 | N/A | N/A | 7636 | 7655 | AACACAGACACTCATACATA | 77 | 2935 |
| 1317194 | 1259 | 1278 | 47572 | 47591 | GCTCCGGTCACAACATTGTG | 64 | 2936 |
| 1317207 | N/A | N/A | 146723 | 146742 | TAGGTTTGTATTATTATCAT | 58 | 2937 |

TABLE 40
Reduction of HTT RNA by 5-10-5 MOE gapmers with mixed PO/PS internucleoside
linkages in A431 cells

| | SEQ | SEQ | SEQ | SEQ | | | |
|---|---|---|---|---|---|---|---|
| | ID No: | ID No: | ID No: | ID No: | | HTT | SEQ |
| Compound | 1 Start | 1 Stop | 2 Start | 2 Stop | | (% | ID |
| Number | Site | Site | Site | Site | Sequence (5′ to 3′) | UTC) | NO |
| 388241 | 4862 | 4881 | 106917 | 106936 | CTCAGTAACATTGACACCAC | 34 | 858 |
| 1314561 | N/A | N/A | 36060 | 36079 | ACCAACTTCATCTGTCCTCC | 77 | 2938 |
| 1314575 | N/A | N/A | 56087 | 56106 | TGTCATTTATTTCAAGGCAC | 67 | 2939 |
| 1314610 | N/A | N/A | 68731 | 68750 | ACTTCTCATCTCCCACGGCA | 61 | 2940 |
| 1314638 | N/A | N/A | 79798 | 79817 | CTCAACTATCTCCAATACAC | 85 | 2941 |
| 1314675 | N/A | N/A | 22178 | 22197 | TTAGGTTGAAATCTACCATC | 94 | 2942 |
| 1314718 | N/A | N/A | 44174 | 44193 | TTTCAGGTCTAACAATGGCA | 55 | 2943 |
| 1314762 | 2234 | 2253 | N/A | N/A | AGCACATTTTTTCCCCCTGT | 8 | 2944 |
| 1314781 | N/A | N/A | 130023 | 130042 | GCACATTCAATCAGCACCTT | 48 | 2945 |
| 1314847 | N/A | N/A | 71296 | 71315 | CACCATGGTACAACTTCCTA | 87 | 2946 |
| 1314860 | N/A | N/A | 134771 | 134790 | GCAACAGGCAATACACAGTA | 49 | 2947 |
| 1314871 | N/A | N/A | 136978 | 136997 | CAGGAGGTTTCTCCCGTCCT | 84 | 2948 |
| 1314875 | N/A | N/A | 19025 | 19044 | ACTGAATTTTTTAACACATT | 84 | 2949 |
| 1314885 | N/A | N/A | 45084 | 45103 | CATCATTTATTTACTTTGGA | 68 | 2950 |
| 1314890 | N/A | N/A | 75524 | 75543 | AAGTTGATTTTATTGCTTCA | 72 | 2951 |
| 1315033 | N/A | N/A | 9955 | 9974 | GACCTAGTTTTTCTAAATCC | 60 | 2952 |
| 1315061 | N/A | N/A | 45653 | 45672 | GCTTAAAATTTATTCTGCAC | 84 | 2953 |
| 1315067 | N/A | N/A | 22784 | 22803 | AATGCTTTTAATTTAGAGAC | 83 | 2954 |
| 1315164 | N/A | N/A | 40891 | 40910 | ACTTGATTCCAATCATTGTT | 88 | 2955 |
| 1315191 | N/A | N/A | 99480 | 99499 | AAAGTATTTCCTGCTTGCTC | 49 | 2956 |
| 1315196 | N/A | N/A | 12774 | 12793 | ACGATGTTGCCCAATTGCTC | 41 | 2957 |
| 1315203 | N/A | N/A | 146719 | 146738 | TTTGTATTATTATCATGCTT | 86 | 2958 |
| 1315233 | N/A | N/A | 106067 | 106086 | CTCAGTGACACATACGCTCA | 99 | 2959 |
| | | | 106123 | 106142 | | | |
| | | | 106179 | 106198 | | | |
| 1315300 | N/A | N/A | 73248 | 73267 | ACTCAGTACCAGTACCTGCA | 96 | 2960 |
| 1315329 | N/A | N/A | 130583 | 130602 | GTAAACATTCATTCTAGATT | 61 | 2961 |
| 1315338 | N/A | N/A | 7632 | 7651 | CAGACACTCATACATATTGC | 59 | 2962 |
| 1315369 | N/A | N/A | 52805 | 52824 | CCTCTCTAAATATTTAAGTC | 94 | 2963 |
| 1315373 | 4328 | 4347 | 101035 | 101054 | GTAGACACTTTCTGGAGGAC | 38 | 2964 |
| 1315422 | N/A | N/A | 46699 | 46718 | ATATCACATTATATGAACAT | 90 | 2965 |
| 1315427 | N/A | N/A | 17478 | 17497 | CCAATCACTATTTTAATGTC | 67 | 2966 |
| 1315463 | N/A | N/A | 117867 | 117886 | CCTTTTATATTCATCAGAAC | 81 | 2967 |
| 1315475 | N/A | N/A | 111915 | 111934 | AGAACATTTTTAATCATGCA | 89 | 2968 |
| 1315483 | 1486 | 1505 | 51867 | 51886 | CCAAGGCTTCTTCTTCTCCT | 46 | 2969 |
| 1315484 | N/A | N/A | 127445 | 127464 | GTCACAGAATTTACCTACAT | 42 | 2970 |
| 1315488 | N/A | N/A | 34613 | 34632 | CTAGTTTGAATATCTCCTTA | 65 | 2971 |
| 1315526 | N/A | N/A | 42018 | 42037 | TACAAGACTCACCATAGTCA | 75 | 2972 |
| 1315554 | N/A | N/A | 25180 | 25199 | CTTCAGATACTTCAATCCTA | 72 | 2973 |
| 1315598 | N/A | N/A | 19727 | 19746 | TGTCATACAATTCACTTCTA | 63 | 2974 |
| 1315612 | N/A | N/A | 106960 | 106979 | AGTTCCAACATACATTCCTC | 84 | 2975 |
| 1315712 | N/A | N/A | 108305 | 108324 | GGCAAACTTCAAACACAGCC | 64 | 2976 |
| 1315749 | N/A | N/A | 49605 | 49624 | TCATGTCTTTACAACTGCAT | 30 | 2977 |
| 1315758 | N/A | N/A | 104460 | 104479 | CGTGATCTACTCTAACCCCA | 92 | 2978 |
| 1315791 | N/A | N/A | 33929 | 33948 | CCATCTCCCAATTCAACTCT | 81 | 2979 |
| 1315793 | N/A | N/A | 120198 | 120217 | GGGCAGATTAAATAAGGTCA | 73 | 2980 |
| 1315860 | N/A | N/A | 116347 | 116366 | CCATCTTAACCATTTTTGGC | 72 | 2981 |
| 1315905 | N/A | N/A | 96357 | 96376 | GAGGAGTATCAATCAACCAA | 75 | 2982 |
| 1315939 | N/A | N/A | 150478 | 150497 | GCCAGTCTTCTCTCATTCTA | 76 | 2983 |
| 1316006 | N/A | N/A | 114843 | 114862 | TCCTTCGACAACACAGGGCA | 91 | 2984 |
| 1316086 | N/A | N/A | 82772 | 82791 | TCAACAGGTCAATCTTCCTC | 58 | 2985 |
| 1316108 | 1256 | 1275 | 47569 | 47588 | CCGGTCACAACATTGTGGTC | 87 | 2986 |
| 1316127 | N/A | N/A | 66581 | 66600 | TGCTGTACTTTCTTTTTTTC | 54 | 2987 |
| 1316174 | N/A | N/A | 17875 | 17894 | TTAACGATATTTATAACTGC | 101 | 2988 |
| 1316247 | 6190 | 6209 | 133251 | 133270 | GAAGCATTTCTACCCGGCGA | 71 | 2989 |
| 1316301 | N/A | N/A | 21885 | 21904 | TTTCACAGTTTTAGAGGCCA | 54 | 2990 |
| 1316385 | N/A | N/A | 69792 | 69811 | AACTTCTGATACATTACCAA | 46 | 2991 |
| 1316408 | N/A | N/A | 2170 | 2189 | CGTAAGTTCACCACTTTACT | 87 | 2992 |
| 1316419 | N/A | N/A | 14982 | 15001 | GTTACACTCATACAGACAGA | 93 | 2993 |
| 1316438 | N/A | N/A | 133762 | 133781 | AGTAAACCCACCTATAAGGC | 86 | 2994 |
| 1316471 | N/A | N/A | 5972 | 5991 | TCTCACTCACATAAATGCCA | 85 | 2995 |
| 1316477 | N/A | N/A | 81050 | 81069 | TAAGCATCTACACCACTTCC | 79 | 2996 |
| 1316537 | 1722 | 1741 | 53737 | 53756 | CAAGATATCCTCCTCATCCC | 73 | 2997 |
| 1316544 | N/A | N/A | 3513 | 3532 | TGTCAATGTATTACTTATGC | 18 | 2998 |
| 1316668 | N/A | N/A | 16461 | 16480 | CCATTTATATAACCTCATTA | 75 | 2999 |
| 1316673 | 2617 | 2636 | 59189 | 59208 | CTGTACAAGCTAACTTGCAA | 78 | 3000 |
| 1316674 | N/A | N/A | 72620 | 72639 | CCAATGGTATCCTTTAACAC | 86 | 3001 |
| 1316849 | N/A | N/A | 60528 | 60547 | AAGAATACTTTATCTCAGTA | 74 | 3002 |
| 1316850 | N/A | N/A | 142693 | 142712 | GCACAGGATCCACAGCCTGA | 97 | 3003 |
| 1316892 | N/A | N/A | 139709 | 139728 | ATAAAGTATTTCATCCTGCA | 77 | 3004 |
| 1316894 | N/A | N/A | 23556 | 23575 | CTGTTTTTCCTATCAGCTTT | 101 | 3005 |
| 1316945 | N/A | N/A | 63067 | 63086 | CCATAACTAAAATTACTGTT | 71 | 3006 |
| 1317047 | N/A | N/A | 126404 | 126423 | TGTTTGTCCCAATAATATGC | 61 | 3007 |
| 1317048 | N/A | N/A | 28748 | 28767 | ACAAACATTTATTTCAACAT | 110 | 3008 |
| 1317075 | N/A | N/A | 110116 | 110135 | GTTGTATCACACAATTTCCA | 60 | 3009 |
| 1317092 | N/A | N/A | 160873 | 160892 | CCAAACGCAACTCCTGGACC | 82 | 3010 |
| 1317116 | N/A | N/A | 84821 | 84840 | CCTTTAAATTTCATGTGCTT | 69 | 3011 |
| 1317156 | N/A | N/A | 32818 | 32837 | CAGTTATATTCTTTAAGGTC | 72 | 3012 |
| 1317186 | N/A | N/A | 118226 | 118245 | ACACATTCTTTCTCTTACTC | 64 | 3013 |
| 1317223 | N/A | N/A | 10454 | 10473 | TGTGTTGTCCTTTTATAACC | 46 | 3014 |

TABLE 41
Reduction of HTT RNA by 5-10-5 MOE gapmers with mixed PO/PS internucleoside
linkages in A431 cells

| | SEQ | SEQ | SEQ | SEQ | | | |
|---|---|---|---|---|---|---|---|
| | ID No: | ID No: | ID No: | ID No: | | HTT | SEQ |
| Compound | 1 Start | 1 Stop | 2 Start | 2 Stop | | (% | ID |
| Number | Site | Site | Site | Site | Sequence (5′ to 3′) | UTC) | NO |
| 388241 | 4862 | 4881 | 106917 | 106936 | CTCAGTAACATTGACACCAC | 42 | 858 |
| 1314543 | 2592 | 2611 | 59164 | 59183 | AGAAGACTCATCCTTCAGTG | 58 | 3015 |
| 1314558 | N/A | N/A | 16051 | 16070 | CCAACATTCCATGAATTCCA | 59 | 3016 |
| 1314563 | N/A | N/A | 142638 | 142657 | TGGGTGTTTTCATATTCCTT | 86 | 3017 |
| 1314602 | N/A | N/A | 126360 | 126379 | GCAGCAGAAATTTCACAAGC | 47 | 3018 |
| 1314645 | N/A | N/A | 57687 | 57706 | TCACCATTTTTTCCCCCTGT | 63 | 3019 |
| 1314705 | N/A | N/A | 19024 | 19043 | CTGAATTTTTTAACACATTG | 74 | 3020 |
| 1314727 | N/A | N/A | 19726 | 19745 | GTCATACAATTCACTTCTAC | 45 | 3021 |
| 1314788 | N/A | N/A | 127444 | 127463 | TCACAGAATTTACCTACATT | 78 | 3022 |
| 1314827 | N/A | N/A | 108304 | 108323 | GCAAACTTCAAACACAGCCT | 45 | 3023 |
| 1314861 | N/A | N/A | 106959 | 106978 | GTTCCAACATACATTCCTCT | 104 | 3024 |
| 1314891 | N/A | N/A | 130010 | 130029 | GCACCTTTATTTCAGAACTC | 40 | 3025 |
| 1314892 | N/A | N/A | 41867 | 41886 | CAGTGCAGTTCACATTCAAT | 66 | 3026 |
| 1314913 | N/A | N/A | 72618 | 72637 | AATGGTATCCTTTAACACGC | 71 | 3027 |
| 1314920 | N/A | N/A | 5957 | 5976 | TGCCAATATCTTTATTCCAT | 41 | 3028 |
| 1314967 | N/A | N/A | 62837 | 62856 | GCATTACTTTTTACAATGGA | 8 | 3029 |
| 1314984 | N/A | N/A | 9954 | 9973 | ACCTAGTTTTTCTAAATCCT | 51 | 3030 |
| 1315022 | N/A | N/A | 17873 | 17892 | AACGATATTTATAACTGCTC | 93 | 3031 |
| 1315158 | N/A | N/A | 133761 | 133780 | GTAAACCCACCTATAAGGCA | 94 | 3032 |
| 1315172 | N/A | N/A | 17477 | 17496 | CAATCACTATTTTAATGTCA | 81 | 3033 |
| 1315184 | N/A | N/A | 118224 | 118243 | ACATTCTTTCTCTTACTCTA | 85 | 3034 |
| 1315218 | N/A | N/A | 106065 | 106084 | CAGTGACACATACGCTCACA | 103 | 3035 |
| | | | 106121 | 106140 | | | |
| | | | 106177 | 106196 | | | |
| 1315231 | N/A | N/A | 111858 | 111877 | AGTGTGTTCAACCATTACTT | 88 | 3036 |
| 1315240 | N/A | N/A | 101020 | 101039 | AGGACATCAAACCATCTGCC | 87 | 3037 |
| 1315252 | N/A | N/A | 22177 | 22196 | TAGGTTGAAATCTACCATCA | 101 | 3038 |
| 1315268 | N/A | N/A | 104340 | 104359 | CAGCAGCTACGATCTTCCTA | 81 | 3039 |
| 1315331 | N/A | N/A | 20135 | 20154 | CACCACATTCCCTCTGGAGT | 95 | 3040 |
| 1315340 | N/A | N/A | 3512 | 3531 | GTCAATGTATTACTTATGCA | 13 | 3041 |
| 1315362 | 1557 | 1576 | 53572 | 53591 | ACTGATCTCATCCTTCACTG | 49 | 3042 |
| 1315366 | N/A | N/A | 56037 | 56056 | TTACTGATCACTCATTCCCA | 70 | 3043 |
| 1315375 | N/A | N/A | 51836 | 51855 | GCCTAGTAAATAATGTACCA | 94 | 3044 |
| 1315458 | N/A | N/A | 117849 | 117868 | ACCGAAGACATTTTCATTCT | 113 | 3045 |
| 1315459 | N/A | N/A | 84110 | 84129 | AGACACATACTTCATATCTA | 92 | 3046 |
| 1315532 | N/A | N/A | 46697 | 46716 | ATCACATTATATGAACATAA | 84 | 3047 |
| 1315579 | N/A | N/A | 32764 | 32783 | GCTTCAGAAATATAACACAT | 78 | 3048 |
| 1315626 | N/A | N/A | 75478 | 75497 | TGGCAGAACATTCTACAACC | 47 | 3049 |
| 1315633 | N/A | N/A | 110115 | 110134 | TTGTATCACACAATTTCCAT | 78 | 3050 |
| 1315676 | N/A | N/A | 68707 | 68726 | TTTGCATTCCCTTCATGGCA | 69 | 3051 |
| 1315786 | N/A | N/A | 40890 | 40909 | CTTGATTCCAATCATTGTTC | 86 | 3052 |
| 1315844 | N/A | N/A | 7631 | 7650 | AGACACTCATACATATTGCT | 83 | 3053 |
| 1315854 | N/A | N/A | 114786 | 114805 | GTCACAGCCACTTAGCAGAA | 95 | 3054 |
| 1315859 | N/A | N/A | 116260 | 116279 | GGCATGAACACATCTCACTA | 71 | 3055 |
| 1315884 | N/A | N/A | 45617 | 45636 | CTTGGATCACAAATTTCCTT | 99 | 3056 |
| 1315900 | N/A | N/A | 96356 | 96375 | AGGAGTATCAATCAACCAAT | 87 | 3057 |
| 1316022 | N/A | N/A | 130507 | 130526 | CAAGTGTCATCTACACAGGA | 81 | 3058 |
| 1316040 | N/A | N/A | 79794 | 79813 | ACTATCTCCAATACACAACA | 84 | 3059 |
| 1316062 | N/A | N/A | 65968 | 65987 | GGGTAACATTTTCCTACAAA | 17 | 3060 |
| 1316085 | 3350 | 3369 | 73156 | 73175 | AGGGTCAGAATCATTGTGGC | 53 | 3061 |
| 1316131 | N/A | N/A | 14860 | 14879 | GGCTGTACAACATTACGAAT | 63 | 3062 |
| 1316167 | N/A | N/A | 12677 | 12696 | GCCTCACTTCCCCCATTATA | 95 | 3063 |
| 1316168 | N/A | N/A | 45038 | 45057 | AAGTCTCACATCCATACCCT | 103 | 3064 |
| 1316178 | N/A | N/A | 71283 | 71302 | CTTCCTACTTTAGACACCTC | 76 | 3065 |
| 1316189 | N/A | N/A | 34599 | 34618 | TCCTTAGTATTAACAAGAAA | 111 | 3066 |
| 1316211 | N/A | N/A | 132766 | 132785 | GATGAGAGATTCATTTTCAA | 102 | 3067 |
| 1316213 | N/A | N/A | 36019 | 36038 | TCCAGTTTCAACCCAGAGCA | 103 | 3068 |
| 1316291 | N/A | N/A | 60517 | 60536 | ATCTCAGTAAATACAAGCTT | 105 | 3069 |
| 1316332 | N/A | N/A | 49604 | 49623 | CATGTCTTTACAACTGCATT | 60 | 3070 |
| 1316349 | N/A | N/A | 28160 | 28179 | CAGGAAGCCTTTCCTGCCTC | 96 | 3071 |
| 1316382 | N/A | N/A | 22783 | 22802 | ATGCTTTTAATTTAGAGACT | 92 | 3072 |
| 1316410 | N/A | N/A | 23474 | 23493 | GTTTTCTATTTTACTGACTT | 65 | 3073 |
| 1316454 | N/A | N/A | 25176 | 25195 | AGATACTTCAATCCTAGACA | 63 | 3074 |
| 1316470 | N/A | N/A | 139683 | 139702 | AGGCACATAATATAATCAGC | 75 | 3075 |
| 1316475 | N/A | N/A | 52804 | 52823 | CTCTCTAAATATTTAAGTCT | 100 | 3076 |
| 1316486 | N/A | N/A | 33924 | 33943 | TCCCAATTCAACTCTTCACC | 88 | 3077 |
| 1316495 | N/A | N/A | 44172 | 44191 | TCAGGTCTAACAATGGCACT | 103 | 3078 |
| 1316529 | N/A | N/A | 81049 | 81068 | AAGCATCTACACCACTTCCC | 88 | 3079 |
| 1316641 | N/A | N/A | 99445 | 99464 | AACGACAGCATTCTTGCCAC | 88 | 3080 |
| 1316643 | N/A | N/A | 134700 | 134719 | TCAAATGCACAAATTCCACT | 96 | 3081 |
| 1316722 | N/A | N/A | 10448 | 10467 | GTCCTTTTATAACCACATTC | 44 | 3082 |
| 1316740 | N/A | N/A | 120197 | 120216 | GGCAGATTAAATAAGGTCAA | 86 | 3083 |
| 1316786 | N/A | N/A | 160857 | 160876 | GACCACCTCAACTCTCCTTC | 80 | 3084 |
| 1316895 | N/A | N/A | 136929 | 136948 | CCATGGCTGCACCATACCCA | 94 | 3085 |
| 1316907 | N/A | N/A | 146718 | 146737 | TTGTATTATTATCATGCTTA | 51 | 3086 |
| 1316948 | 7827 | 7846 | 150346 | 150365 | TCTCTTTGAAACCATTGCTT | 68 | 3087 |
| 1317011 | N/A | N/A | 2164 | 2183 | TTCACCACTTTACTTGGCAA | 63 | 3088 |
| 1317073 | N/A | N/A | 47525 | 47544 | CAGTTCATAAACCTAGAAAC | 101 | 3089 |
| 1317102 | N/A | N/A | 69788 | 69807 | TCTGATACATTACCAATGCA | 48 | 3090 |
| 1317134 | N/A | N/A | 82771 | 82790 | CAACAGGTCAATCTTCCTCC | 72 | 3091 |

TABLE 42
Reduction of HTT RNA by 5-10-5 MOE gapmers with mixed PO/PS internucleoside
linkages in A431 cells

| | SEQ | SEQ | SEQ | SEQ | | | |
|---|---|---|---|---|---|---|---|
| | ID No: | ID No: | ID No: | ID No: | | HTT | SEQ |
| Compound | 1 Start | 1 Stop | 2 Start | 2 Stop | Sequence | (% | ID |
| Number | Site | Site | Site | Site | (5′ to 3′) | UTC) | NO |
| 388241 | 4862 | 4881 | 106917 | 106936 | CTCAGTAACATTGACACCAC | 44 | 858 |
| 1314481 | N/A | N/A | 46683 | 46702 | ACATAATGAATTTATTCTTT | 85 | 3092 |
| 1314515 | N/A | N/A | 79789 | 79808 | CTCCAATACACAACACATGA | 94 | 3093 |
| 1314634 | N/A | N/A | 23197 | 23216 | GCCAGTCTCAAACAATCCAC | 78 | 3094 |
| 1314647 | N/A | N/A | 110110 | 110129 | TCACACAATTTCCATTGCGG | 47 | 3095 |
| 1314708 | N/A | N/A | 142633 | 142652 | GTTTTCATATTCCTTAGGTA | 16 | 3096 |
| 1314714 | N/A | N/A | 136758 | 136777 | GTAGAGGAAATCTCGCTGCA | 64 | 3097 |
| 1314760 | N/A | N/A | 52755 | 52774 | TAGATAGGATTATACAACCA | 63 | 3098 |
| 1314799 | N/A | N/A | 14805 | 14824 | ACAGTCAATTTTATGTGCAT | 61 | 3099 |
| 1314839 | N/A | N/A | 17476 | 17495 | AATCACTATTTTAATGTCAC | 69 | 3100 |
| 1314853 | N/A | N/A | 34542 | 34561 | ACAGTTTATTCCAAATCATT | 65 | 3101 |
| 1314857 | N/A | N/A | 117847 | 117866 | CGAAGACATTTTCATTCTGT | 83 | 3102 |
| 1314864 | N/A | N/A | 19010 | 19029 | ACATTGTTAATATATTTTCC | 52 | 3103 |
| 1314907 | N/A | N/A | 62836 | 62855 | CATTACTTTTTACAATGGAC | 17 | 3104 |
| 1314918 | 2233 | 2252 | N/A | N/A | GCACATTTTTTCCCCCTGTT | 8 | 3105 |
| 1314926 | N/A | N/A | 22176 | 22195 | AGGTTGAAATCTACCATCAA | 77 | 3106 |
| 1314977 | N/A | N/A | 32695 | 32714 | TTAGTGATTATACCTCTGCA | 67 | 3107 |
| 1314996 | N/A | N/A | 15972 | 15991 | GAGATCTTATTTCCTGGGTC | 43 | 3108 |
| 1315093 | N/A | N/A | 45031 | 45050 | ACATCCATACCCTTTTTTCC | 98 | 3109 |
| 1315146 | N/A | N/A | 27915 | 27934 | ACCTAGTTTTCACCATACAC | 70 | 3110 |
| 1315156 | N/A | N/A | 116253 | 116272 | ACACATCTCACTAGAGACTT | 50 | 3111 |
| 1315162 | N/A | N/A | 106957 | 106976 | TCCAACATACATTCCTCTTA | 69 | 3112 |
| 1315242 | N/A | N/A | 146707 | 146726 | TCATGCTTAAATCTTTTCTG | 79 | 3113 |
| 1315290 | N/A | N/A | 105978 | 105997 | CAGAGGCACACTCTGACCCC | 97 | 3114 |
| | | | 106033 | 106052 | | | |
| | | | 106087 | 106106 | | | |
| | | | 106143 | 106162 | | | |
| 1315308 | N/A | N/A | 20134 | 20153 | ACCACATTCCCTCTGGAGTA | 81 | 3115 |
| 1315389 | N/A | N/A | 7629 | 7648 | ACACTCATACATATTGCTTA | 62 | 3116 |
| 1315410 | N/A | N/A | 133729 | 133748 | GTCCTGTGAATTTATTCCCG | 60 | 3117 |
| 1315467 | N/A | N/A | 56033 | 56052 | TGATCACTCATTCCCACTAC | 86 | 3118 |
| 1315514 | N/A | N/A | 99153 | 99172 | ACAACACTTTTAAGAATCTC | 99 | 3119 |
| 1315521 | N/A | N/A | 111717 | 111736 | CCACATCTTACAACAAGGGA | 60 | 3120 |
| 1315551 | N/A | N/A | 130464 | 130483 | TCAACCCCGTTTACAGGCAT | 73 | 3121 |
| 1315564 | 3349 | 3368 | 73155 | 73174 | GGGTCAGAATCATTGTGGCC | 92 | 3122 |
| 1315568 | N/A | N/A | 75477 | 75496 | GGCAGAACATTCTACAACCA | 51 | 3123 |
| 1315678 | N/A | N/A | 65967 | 65986 | GGTAACATTTTCCTACAAAA | 22 | 3124 |
| 1315682 | N/A | N/A | 139682 | 139701 | GGCACATAATATAATCAGCA | 69 | 3125 |
| 1315684 | N/A | N/A | 108287 | 108306 | CCTTGACTAAACTATTCTGC | 83 | 3126 |
| 1315709 | N/A | N/A | 17872 | 17891 | ACGATATTTATAACTGCTCT | 56 | 3127 |
| 1315795 | N/A | N/A | 10442 | 10461 | TTATAACCACATTCACCTCC | 70 | 3128 |
| 1315799 | N/A | N/A | 114688 | 114707 | GCAAGCACTTACGAGTGCCT | 89 | 3129 |
| 1315812 | N/A | N/A | 49039 | 49058 | TCGCAGTTCAACATTTTAAT | 33 | 3130 |
| 1315850 | N/A | N/A | 100969 | 100988 | AATATCTTTAAATAATCTCC | 90 | 3131 |
| 1315865 | N/A | N/A | 126359 | 126378 | CAGCAGAAATTTCACAAGCC | 52 | 3132 |
| 1315879 | N/A | N/A | 19673 | 19692 | GCGAACAATTTAATTAATCT | 33 | 3133 |
| 1315912 | N/A | N/A | 25119 | 25138 | AACCTACAATATTCTTGGAA | 82 | 3134 |
| 1315981 | N/A | N/A | 82403 | 82422 | TCAAGGATACAAAATTTCAT | 68 | 3135 |
| 1316015 | N/A | N/A | 134696 | 134715 | ATGCACAAATTCCACTATCA | 63 | 3136 |
| 1316039 | N/A | N/A | 95286 | 95305 | GCCTAAAATTTTCCAAACTT | 79 | 3137 |
| 1316051 | N/A | N/A | 5955 | 5974 | CCAATATCTTTATTCCATCT | 42 | 3138 |
| 1316070 | N/A | N/A | 160850 | 160869 | TCAACTCTCCTTCCCTGAGT | 100 | 3139 |
| 1316147 | N/A | N/A | 150214 | 150233 | ACCAGAACTTTCCCTCCGCT | 88 | 3140 |
| 1316210 | N/A | N/A | 41865 | 41884 | GTGCAGTTCACATTCAATCA | 55 | 3141 |
| 1316235 | N/A | N/A | 68706 | 68725 | TTGCATTCCCTTCATGGCAC | 47 | 3142 |
| 1316275 | N/A | N/A | 118171 | 118190 | GACTGTTGAATACAATCACC | 79 | 3143 |
| 1316407 | N/A | N/A | 127443 | 127462 | CACAGAATTTACCTACATTT | 62 | 3144 |
| 1316411 | N/A | N/A | 69445 | 69464 | CTGGCTTATTTTAATTGTTG | 87 | 3145 |
| 1316441 | N/A | N/A | 53405 | 53424 | CAGTGCATCCTTCAAGCATC | 74 | 3146 |
| 1316446 | N/A | N/A | 132618 | 132637 | GAAACTCGATTTACCAAGGC | 56 | 3147 |
| 1316501 | N/A | N/A | 72616 | 72635 | TGGTATCCTTTAACACGCCA | 74 | 3148 |
| 1316712 | N/A | N/A | 33845 | 33864 | GATGGTAGTCTAAATTACGA | 61 | 3149 |
| 1316730 | N/A | N/A | 3511 | 3530 | TCAATGTATTACTTATGCAA | 50 | 3150 |
| 1316762 | N/A | N/A | 12593 | 12612 | CCAGCATTTAAACCCAGGTC | 31 | 3151 |
| 1316790 | N/A | N/A | 59112 | 59131 | GAAAATGTATTTCCTAACCA | 83 | 3152 |
| 1316798 | N/A | N/A | 22749 | 22768 | GCATCTGCTCTATCTTGGCA | 73 | 3153 |
| 1316821 | N/A | N/A | 84108 | 84127 | ACACATACTTCATATCTAAC | 93 | 3154 |
| 1316822 | N/A | N/A | 60516 | 60535 | TCTCAGTAAATACAAGCTTA | 72 | 3155 |
| 1316902 | N/A | N/A | 43973 | 43992 | CTGATTTTTTTCTTTAAGAC | 78 | 3156 |
| 1316974 | N/A | N/A | 119915 | 119934 | TGGACAACACTTCAACAGTA | 74 | 3157 |
| 1316981 | N/A | N/A | 45615 | 45634 | TGGATCACAAATTTCCTTTA | 71 | 3158 |
| 1316985 | N/A | N/A | 2149 | 2168 | GGCAACCACAACTCATTCAA | 39 | 3159 |
| 1317004 | N/A | N/A | 51827 | 51846 | ATAATGTACCAACATTCCTT | 73 | 3160 |
| 1317012 | N/A | N/A | 47485 | 47504 | GTCAGAGTTTATAAAATGCA | 67 | 3161 |
| 1317022 | N/A | N/A | 40889 | 40908 | TTGATTCCAATCATTGTTCA | 68 | 3162 |
| 1317064 | N/A | N/A | 104336 | 104355 | AGCTACGATCTTCCTAGCTC | 80 | 3163 |
| 1317095 | N/A | N/A | 130006 | 130025 | CTTTATTTCAGAACTCACAC | 83 | 3164 |
| 1317155 | N/A | N/A | 9953 | 9972 | CCTAGTTTTTCTAAATCCTC | 65 | 3165 |
| 1317196 | N/A | N/A | 81048 | 81067 | AGCATCTACACCACTTCCCT | 81 | 3166 |
| 1317229 | N/A | N/A | 71084 | 71103 | ATCCTGTTTTTCCATCCCAA | 47 | 3167 |
| 1317232 | N/A | N/A | 35996 | 36015 | AACACAGCTTTCTCATCAAA | 85 | 3168 |

TABLE 43
Reduction of HTT RNA by 5-10-5 MOE gapmers with mixed PO/PS internucleoside
linkages in A431 cells

| | SEQ | SEQ | SEQ | SEQ | | | |
|---|---|---|---|---|---|---|---|
| | ID No: | ID No: | ID No: | ID No: | | HTT | SEQ |
| Compound | 1 Start | 1 Stop | 2 Start | 2 Stop | Sequence | (% | ID |
| Number | Site | Site | Site | Site | (5′ to 3′) | UTC) | NO |
| 388241 | 4862 | 4881 | 106917 | 106936 | CTCAGTAACATTGACACCAC | 25 | 858 |
| 1314489 | N/A | N/A | 22601 | 22620 | TGTTCTACAAATCATTGAGA | 74 | 3169 |
| 1314538 | N/A | N/A | 119789 | 119808 | AGAACACACCACCCTTATCC | 90 | 3170 |
| 1314591 | N/A | N/A | 3163 | 3182 | AAGGTAATCATATATTACCT | 99 | 3171 |
| 1314600 | N/A | N/A | 23196 | 23215 | CCAGTCTCAAACAATCCACC | 89 | 3172 |
| 1314652 | N/A | N/A | 52754 | 52773 | AGATAGGATTATACAACCAA | 50 | 3173 |
| 1314720 | N/A | N/A | 118167 | 118186 | GTTGAATACAATCACCACAT | 52 | 3174 |
| 1314732 | N/A | N/A | 46679 | 46698 | AATGAATTTATTCTTTTTCC | 87 | 3175 |
| 1314766 | N/A | N/A | 160838 | 160857 | CCCTGAGTCCTCCATGCCCA | 67 | 3176 |
| 1314816 | N/A | N/A | 45613 | 45632 | GATCACAAATTTCCTTTATA | 74 | 3177 |
| 1314836 | N/A | N/A | 17860 | 17879 | ACTGCTCTTTACACAGGCTA | 77 | 3178 |
| 1314889 | N/A | N/A | 47484 | 47503 | TCAGAGTTTATAAAATGCAT | 95 | 3179 |
| 1314921 | N/A | N/A | 106956 | 106975 | CCAACATACATTCCTCTTAC | 91 | 3180 |
| 1314928 | N/A | N/A | 56032 | 56051 | GATCACTCATTCCCACTACA | 37 | 3181 |
| 1314932 | N/A | N/A | 79767 | 79786 | GCATATAGAACATCGAGACT | 74 | 3182 |
| 1314942 | N/A | N/A | 5948 | 5967 | CTTTATTCCATCTACAAGGC | 44 | 3183 |
| 1314957 | N/A | N/A | 75476 | 75495 | GCAGAACATTCTACAACCAT | 39 | 3184 |
| 1314973 | N/A | N/A | 15971 | 15990 | AGATCTTATTTCCTGGGTCA | 56 | 3185 |
| 1314985 | N/A | N/A | 32693 | 32712 | AGTGATTATACCTCTGCAGC | 63 | 3186 |
| 1314988 | N/A | N/A | 17461 | 17480 | GTCACATACATTAAGTCTCA | 43 | 3187 |
| 1315031 | N/A | N/A | 83974 | 83993 | GCTGACATAAACTTTCCCTA | 58 | 3188 |
| 1315060 | N/A | N/A | 108286 | 108305 | CTTGACTAAACTATTCTGCA | 80 | 3189 |
| 1315077 | N/A | N/A | 82236 | 82255 | GGTTAATTAGCCATTCCACA | 28 | 3190 |
| 1315117 | N/A | N/A | 117846 | 117865 | GAAGACATTTTCATTCTGTT | 63 | 3191 |
| 1315140 | N/A | N/A | 60469 | 60488 | TGGTTCTTTCTTCCTTCCAT | 58 | 3192 |
| 1315147 | N/A | N/A | 129960 | 129979 | GCTTTTGAAATTCTCCATCT | 23 | 3193 |
| 1315181 | N/A | N/A | 114647 | 114666 | TCCAAACAATTTATGAGGGA | 39 | 3194 |
| 1315226 | N/A | N/A | 19671 | 19690 | GAACAATTTAATTAATCTCT | 59 | 3195 |
| 1315235 | N/A | N/A | 139638 | 139657 | ACGCTGACTTTCCCACTTCC | 63 | 3196 |
| 1315279 | N/A | N/A | 20055 | 20074 | GCTTATAGCTTCATCACTCC | 66 | 3197 |
| 1315341 | N/A | N/A | 68690 | 68709 | GCACATGTCAATTTCTATCC | 14 | 3198 |
| 1315378 | N/A | N/A | 2148 | 2167 | GCAACCACAACTCATTCAAA | 68 | 3199 |
| 1315388 | N/A | N/A | 81047 | 81066 | GCATCTACACCACTTCCCTT | 65 | 3200 |
| 1315396 | 3348 | 3367 | 73154 | 73173 | GGTCAGAATCATTGTGGCCA | 71 | 3201 |
| 1315450 | N/A | N/A | 72563 | 72582 | GCAACCTCAAATAAGCAGGA | 44 | 3202 |
| 1315490 | N/A | N/A | 116182 | 116201 | ACCACATGCACACCACTATC | 101 | 3203 |
| 1315491 | N/A | N/A | 130455 | 130474 | TTTACAGGCATTTCAAACTT | 90 | 3204 |
| 1315502 | N/A | N/A | 41863 | 41882 | GCAGTTCACATTCAATCAAC | 52 | 3205 |
| 1315548 | N/A | N/A | 45025 | 45044 | ATACCCTTTTTTCCCCTTCA | 80 | 3206 |
| 1315595 | N/A | N/A | 9952 | 9971 | CTAGTTTTTCTAAATCCTCA | 53 | 3207 |
| 1315610 | N/A | N/A | 51816 | 51835 | ACATTCCTTTTAGTTTGCTA | 97 | 3208 |
| 1315662 | N/A | N/A | 49035 | 49054 | AGTTCAACATTTTAATTTCA | 53 | 3209 |
| 1315677 | N/A | N/A | 133727 | 133746 | CCTGTGAATTTATTCCCGTA | 66 | 3210 |
| 1315680 | N/A | N/A | 104335 | 104354 | GCTACGATCTTCCTAGCTCT | 88 | 3211 |
| 1315695 | N/A | N/A | 105919 | 105938 | CACTCTGACCCCTCAGTGAC | 96 | 3212 |
| | | | 105970 | 105989 | | | |
| | | | 106025 | 106044 | | | |
| 1315722 | N/A | N/A | 35939 | 35958 | CCATGACTATTTACTTAGGC | 30 | 3213 |
| 1315773 | N/A | N/A | 25118 | 25137 | ACCTACAATATTCTTGGAAC | 77 | 3214 |
| 1315784 | N/A | N/A | 142507 | 142526 | TGGGTCATTCTCTAATTACA | 37 | 3215 |
| 1315785 | N/A | N/A | 70585 | 70604 | AGCAAATTAACATTACTTTT | 56 | 3216 |
| 1315823 | N/A | N/A | 40806 | 40825 | AGTAAACTAGTAACTGGCAT | 43 | 3217 |
| 1315888 | N/A | N/A | 65920 | 65939 | ACTCAGTAATACTTTTAGAA | 78 | 3218 |
| 1315893 | N/A | N/A | 53390 | 53409 | GCATCTCTCACACTGCCTCC | 42 | 3219 |
| 1315938 | N/A | N/A | 127442 | 127461 | ACAGAATTTACCTACATTTA | 70 | 3220 |
| 1315974 | N/A | N/A | 69408 | 69427 | TGAATTTTTTTATTTTGGGC | 29 | 3221 |
| 1316014 | N/A | N/A | 12571 | 12590 | CTGGCTTTAAATCTCCTCTG | 54 | 3222 |
| 1316029 | N/A | N/A | 22173 | 22192 | TTGAAATCTACCATCAAGCT | 81 | 3223 |
| 1316049 | N/A | N/A | 14077 | 14096 | TCTGACTGACTATAAAGGCT | 66 | 3224 |
| 1316050 | N/A | N/A | 111602 | 111621 | TGCTCTGTCATCCATGCAGC | 98 | 3225 |
| 1316082 | N/A | N/A | 62709 | 62728 | CTGCTCTACATCCTTTGAAT | 65 | 3226 |
| 1316161 | N/A | N/A | 27667 | 27686 | CCAAACTTAAGCATAAGGGA | 77 | 3227 |
| 1316259 | N/A | N/A | 59086 | 59105 | CAAGCAACAAACATCATCAT | 106 | 3228 |
| 1316279 | N/A | N/A | 126357 | 126376 | GCAGAAATTTCACAAGCCCT | 39 | 3229 |
| 1316293 | N/A | N/A | 19009 | 19028 | CATTGTTAATATATTTTCCA | 67 | 3230 |
| 1316313 | N/A | N/A | 150170 | 150189 | ACCAAATGAAACTCACTTCC | 87 | 3231 |
| 1316490 | 4017 | 4036 | 98625 | 98644 | TCCTAGGATCTCTTCAACAC | 72 | 3232 |
| 1316503 | N/A | N/A | 110109 | 110128 | CACACAATTTCCATTGCGGC | 47 | 3233 |
| 1316569 | N/A | N/A | 34541 | 34560 | CAGTTTATTCCAAATCATTC | 69 | 3234 |
| 1316574 | N/A | N/A | 57535 | 57554 | TCAACAATACATTCATGCAT | 88 | 3235 |
| 1316656 | N/A | N/A | 33842 | 33861 | GGTAGTCTAAATTACGACAT | 58 | 3236 |
| 1316782 | N/A | N/A | 10440 | 10459 | ATAACCACATTCACCTCCCT | 76 | 3237 |
| 1316801 | N/A | N/A | 132598 | 132617 | CGTCACCTCCAACCACGCAC | 93 | 3238 |
| 1316805 | N/A | N/A | 100968 | 100987 | ATATCTTTAAATAATCTCCT | 91 | 3239 |
| 1316812 | N/A | N/A | 94658 | 94677 | CCGTCGCCACATCAAGCTCA | 68 | 3240 |
| 1316951 | N/A | N/A | 134695 | 134714 | TGCACAAATTCCACTATCAA | 83 | 3241 |
| 1316960 | N/A | N/A | 7528 | 7547 | CTGACCATTTACACAAAGTT | 60 | 3242 |
| 1317097 | N/A | N/A | 43595 | 43614 | AATGTATTATTACCATGGCT | 54 | 3243 |
| 1317132 | N/A | N/A | 136720 | 136739 | GACTAAAGATCAACTTCCAA | 90 | 3244 |
| 1317160 | 7482 | 7501 | 146574 | 146593 | GATGAACTCCTTAAAGACTT | 75 | 3245 |

TABLE 44
Reduction of HTT RNA by 5-10-5 MOE gapmers with mixed PO/PS internucleoside
linkages in A431 cells

| | SEQ | SEQ | SEQ | SEQ | | | |
|---|---|---|---|---|---|---|---|
| | ID No: | ID No: | ID No: | ID No: | | HTT | SEQ |
| Compound | 1 Start | 1 Stop | 2 Start | 2 Stop | | (% | ID |
| Number | Site | Site | Site | Site | Sequence (5′ to 3′) | UTC) | NO |
| 388241 | 4862 | 4881 | 106917 | 106936 | CTCAGTAACATTGACACCAC | 31 | 858 |
| 1314569 | N/A | N/A | 23113 | 23132 | ACTCTGGATTCCATTTGCTT | 68 | 3246 |
| 1314579 | N/A | N/A | 100949 | 100968 | TCTGCACTCAGATATACTCC | 97 | 3247 |
| 1314682 | N/A | N/A | 20048 | 20067 | GCTTCATCACTCCAATTTTC | 66 | 3248 |
| 1314700 | N/A | N/A | 52753 | 52772 | GATAGGATTATACAACCAAA | 39 | 3249 |
| 1314759 | N/A | N/A | 47448 | 47467 | TTGTTGTTTTTAATAGGACT | 64 | 3250 |
| 1314845 | N/A | N/A | 108248 | 108267 | TGGACATTCACTTCAATTCT | 21 | 3251 |
| 1314912 | N/A | N/A | 106955 | 106974 | CAACATACATTCCTCTTACC | 100 | 3252 |
| 1314916 | N/A | N/A | 70545 | 70564 | AACAAAAGTTATACTTGCTC | 25 | 3253 |
| 1315120 | N/A | N/A | 34540 | 34559 | AGTTTATTCCAAATCATTCA | 70 | 3254 |
| 1315128 | N/A | N/A | 5894 | 5913 | CTCTTGGACCTTACTTCTTA | 72 | 3255 |
| 1315197 | N/A | N/A | 59085 | 59104 | AAGCAACAAACATCATCATC | 76 | 3256 |
| 1315230 | N/A | N/A | 12555 | 12574 | TCTGTATTTCACCAATACTC | 84 | 3257 |
| 1315243 | N/A | N/A | 110108 | 110127 | ACACAATTTCCATTGCGGCA | 47 | 3258 |
| 1315274 | N/A | N/A | 68688 | 68707 | ACATGTCAATTTCTATCCCC | 50 | 3259 |
| 1315333 | N/A | N/A | 19670 | 19689 | AACAATTTAATTAATCTCTT | 91 | 3260 |
| 1315425 | N/A | N/A | 53331 | 53350 | GGTGATATTCTCAAATGCTG | 20 | 3261 |
| 1315478 | N/A | N/A | 133725 | 133744 | TGTGAATTTATTCCCGTACA | 58 | 3262 |
| 1315498 | 3321 | 3340 | 73127 | 73146 | GGTACAGCTCTTCCTAGACT | 28 | 3263 |
| 1315520 | N/A | N/A | 105929 | 105948 | CACACAGGCACACTCTGACC | 99 | 3264 |
| | | | 106232 | 106251 | | | |
| 1315596 | N/A | N/A | 130451 | 130470 | CAGGCATTTCAAACTTACGA | 57 | 3265 |
| 1315603 | N/A | N/A | 9949 | 9968 | GTTTTTCTAAATCCTCACCA | 87 | 3266 |
| 1315665 | N/A | N/A | 60440 | 60459 | TGTCATGGTTTCAACTCTCA | 47 | 3267 |
| 1315666 | N/A | N/A | 83970 | 83989 | ACATAAACTTTCCCTAGCTG | 97 | 3268 |
| 1315734 | N/A | N/A | 104194 | 104213 | TGGGAACACTTTCCTTCTGC | 73 | 3269 |
| 1315897 | N/A | N/A | 69362 | 69381 | ACATAGTCATTTACATTCCT | 32 | 3270 |
| 1315963 | N/A | N/A | 62700 | 62719 | ATCCTTTGAATTCTTCCCTC | 46 | 3271 |
| 1315984 | N/A | N/A | 81881 | 81900 | GTACACATATTTCAAACATC | 36 | 3272 |
| 1316009 | N/A | N/A | 119664 | 119683 | CTATCATTCATTAACAAGCC | 69 | 3273 |
| 1316072 | N/A | N/A | 142147 | 142166 | CCAAAGAATCTTCCTCCCAA | 70 | 3274 |
| 1316105 | N/A | N/A | 125991 | 126010 | TCTTTGCTTTCATCTCGGTC | 91 | 3275 |
| 1316135 | 7752 | 7771 | 149840 | 149859 | GTCGAGAGCTTTCAGAGGCT | 75 | 3276 |
| 1316137 | N/A | N/A | 10439 | 10458 | TAACCACATTCACCTCCCTC | 85 | 3277 |
| 1316188 | N/A | N/A | 116179 | 116198 | ACATGCACACCACTATCCCC | 93 | 3278 |
| 1316194 | N/A | N/A | 51147 | 51166 | TTGGGAATTTCTAATTTCTG | 62 | 3279 |
| 1316232 | N/A | N/A | 15877 | 15896 | GCCAAGTATTTAAAGTCATT | 30 | 3280 |
| 1316245 | N/A | N/A | 118156 | 118175 | TCACCACATCATAATTTGTC | 78 | 3281 |
| 1316260 | N/A | N/A | 14066 | 14085 | ATAAAGGCTTTTTCTAGCTT | 83 | 3282 |
| 1316268 | N/A | N/A | 22172 | 22191 | TGAAATCTACCATCAAGCTC | 70 | 3283 |
| 1316277 | N/A | N/A | 56030 | 56049 | TCACTCATTCCCACTACATT | 69 | 3284 |
| 1316284 | N/A | N/A | 46678 | 46697 | ATGAATTTATTCTTTTTCCC | 77 | 3285 |
| 1316343 | N/A | N/A | 33829 | 33848 | ACGACATACAACATACCCCA | 83 | 3286 |
| 1316355 | 7474 | 7493 | 146566 | 146585 | CCTTAAAGACTTCCTTTTCC | 81 | 3287 |
| 1316406 | N/A | N/A | 25082 | 25101 | GCAGTCTATCTCTCCTGCCC | 65 | 3288 |
| 1316412 | N/A | N/A | 139636 | 139655 | GCTGACTTTCCCACTTCCCC | 50 | 3289 |
| 1316420 | N/A | N/A | 111482 | 111501 | CCTTCATTTCTGCCAACTTA | 66 | 3290 |
| 1316421 | N/A | N/A | 7494 | 7513 | GGTGGAAGACAATATTGTTA | 28 | 3291 |
| 1316447 | N/A | N/A | 98619 | 98638 | GATCTCTTCAACACACTGTA | 65 | 3292 |
| 1316458 | N/A | N/A | 3162 | 3181 | AGGTAATCATATATTACCTT | 90 | 3293 |
| 1316493 | N/A | N/A | 17448 | 17467 | AGTCTCACCATATTAGTGTT | 59 | 3294 |
| 1316502 | N/A | N/A | 19005 | 19024 | GTTAATATATTTTCCAGTCA | 34 | 3295 |
| 1316508 | N/A | N/A | 35938 | 35957 | CATGACTATTTACTTAGGCA | 33 | 3296 |
| 1316526 | N/A | N/A | 129865 | 129884 | TCACCACTCTAAACATGTTG | 83 | 3297 |
| 1316642 | N/A | N/A | 114576 | 114595 | GAGAAGACTTTTATTACTGA | 58 | 3298 |
| 1316667 | N/A | N/A | 134685 | 134704 | CCACTATCAAATATCCCAGT | 69 | 3299 |
| 1316670 | N/A | N/A | 49033 | 49052 | TTCAACATTTTAATTTCAAT | 69 | 3300 |
| 1316717 | N/A | N/A | 94648 | 94667 | ATCAAGCTCACCTCTCCAGC | 75 | 3301 |
| 1316734 | N/A | N/A | 22599 | 22618 | TTCTACAAATCATTGAGAGC | 90 | 3302 |
| 1316736 | N/A | N/A | 127413 | 127432 | GTAGTTTGCCCTCAGAGGGC | 101 | 3303 |
| 1316763 | N/A | N/A | 32691 | 32710 | TGATTATACCTCTGCAGCCA | 83 | 3304 |
| 1316777 | N/A | N/A | 75473 | 75492 | GAACATTCTACAACCATGGA | 63 | 3305 |
| 1316781 | N/A | N/A | 45602 | 45621 | TCCTTTATAAATCTTGCTGA | 81 | 3306 |
| 1316793 | N/A | N/A | 41862 | 41881 | CAGTTCACATTCAATCAACC | 67 | 3307 |
| 1316794 | N/A | N/A | 40143 | 40162 | GCCACAGGACTCCCTCCCAA | 83 | 3308 |
| 1316921 | N/A | N/A | 17823 | 17842 | TGCTGTCAATACTTTCCCCA | 52 | 3309 |
| 1316930 | N/A | N/A | 111914 | 111933 | GAACATTTTTAATCATGCAA | 42 | 3310 |
| 1316934 | N/A | N/A | 57518 | 57537 | CATTAGTTCATTCAACAGAT | 74 | 3311 |
| 1316939 | N/A | N/A | 81041 | 81060 | ACACCACTTCCCTTACTGAA | 68 | 3312 |
| 1316995 | N/A | N/A | 132366 | 132385 | CTCCAATTACTCTTTTTCCA | 34 | 3313 |
| 1317029 | N/A | N/A | 79758 | 79777 | ACATCGAGACTCCCAATGCT | 76 | 3314 |
| 1317039 | N/A | N/A | 117845 | 117864 | AAGACATTTTCATTCTGTTC | 76 | 3315 |
| 1317077 | N/A | N/A | 160816 | 160835 | GCAAGAGCCATAGAACAGCC | 71 | 3316 |
| 1317096 | N/A | N/A | 43583 | 43602 | CCATGGCTACACCCTTTTTA | 74 | 3317 |
| 1317103 | N/A | N/A | 136631 | 136650 | CTTGACTTCCATTCTGTCTT | 88 | 3318 |
| 1317109 | N/A | N/A | 65894 | 65913 | AACTATTTTATCATATTGGT | 61 | 3319 |
| 1317165 | N/A | N/A | 26786 | 26805 | GGAGCTAGAATCCCATGGCT | 100 | 3320 |
| 1317170 | N/A | N/A | 72552 | 72571 | TAAGCAGGACTACCCAGGGC | 59 | 3321 |
| 1317221 | N/A | N/A | 45023 | 45042 | ACCCTTTTTTCCCCTTCACC | 79 | 3322 |

TABLE 45
Reduction of HTT RNA by 5-10-5 MOE gapmers with mixed PO/PS internucleoside
linkages in A431 cells

| | SEQ | SEQ | | | | | |
|---|---|---|---|---|---|---|---|
| | ID | ID | SEQ | SEQ | | | |
| | No: 1 | No: 1 | ID No: | ID No: | | HTT | SEQ |
| Compound | Start | Stop | 2 Start | 2 Stop | | (% | ID |
| Number | Site | Site | Site | Site | Sequence (5′ to 3′) | UTC) | NO |
| 388241 | 4862 | 4881 | 106917 | 106936 | CTCAGTAACATTGACACCAC | 42 | 858 |
| 1231500 | 4275 | 4294 | 99393 | 99412 | CGCCTGCACCATGTTCCTCA | 89 | 3323 |
| 1231544 | 6011 | 6030 | 132941 | 132960 | CGAGACTGAATTGCCTGGAT | 37 | 3324 |
| 1315753 | 8661 | 8680 | 161607 | 161626 | ATAGTTCTCAATGAGGTAAA | 78 | 3325 |
| 1315817 | 2795 | 2814 | 62219 | 62238 | TCTGCTTTTGCCTCCAAAAA | 10† | 3326 |
| 1315833 | 4858 | 4877 | 106913 | 106932 | GTAACATTGACACCACCACC | 45 | 3327 |
| 1316023 | 4609 | 4628 | N/A | N/A | TTGCCTCTGATTCCCTGAAC | 35 | 3328 |
| 1316059 | 4733 | 4752 | 104720 | 104739 | GCCTTCCTTCCACTGGCCAT | 89 | 3329 |
| 1316117 | 4813 | 4832 | 106868 | 106887 | CTGCATCAGCTTTATTTGTT | 45 | 3330 |
| 1316152 | 4605 | 4624 | N/A | N/A | CTCTGATTCCCTGAACTGGC | 66 | 3331 |
| 1316206 | 171 | 190 | 1156 | 1175 | CTTGAGGGACTCGAAGGCCT | 64 | 3332 |
| 1316266 | N/A | N/A | 1446 | 1465 | GCAGGGTTACCGCCATCCCC | 87 | 3333 |
| 1316341 | 7724 | 7743 | 149812 | 149831 | GGCTGCTGCTCCAAGCAGCT | 94 | 3334 |
| 1316545 | 5808 | 5827 | 130391 | 130410 | TTCTCTATTGCACATTCCAA | 36 | 3335 |
| 1316899 | 4713 | 4732 | 104700 | 104719 | GATGCCATCACAGAGCTGAA | 56 | 3336 |
| 1316926 | 4384 | 4403 | N/A | N/A | TAGCATTCTTATCTGCACGG | 20 | 3337 |
| 1316928 | 127 | 146 | 1112 | 1131 | TGGCGGTCTCCCGCCCGGCA | 101 | 3338 |
| 1316972 | 4826 | 4845 | 106881 | 106900 | TCAAGCTCTTTTCCTGCATC | 26 | 1232 |
| 1317019 | 107 | 126 | 1092 | 1111 | CGGCAGTCCCCGGAGGCCTC | 92 | 3339 |
| 1317101 | N/A | N/A | 1437 | 1456 | CCGCCATCCCCGCCGTAGCC | 85 | 3340 |
| 1317179 | 389 | 408 | 1368 | 1387 | TGCAGCGGCTCCTCAGCCAC | 91 | 3341 |
| 1318565 | 4820 | 4839 | 106875 | 106894 | TCTTTTCCTGCATCAGCTTT | 57 | 3342 |
| 1318568 | 967 | 986 | 41677 | 41696 | GGCAGATGCTCACTGCTGAT | 84 | 3343 |
| 1318569 | 4810 | 4829 | 106865 | 106884 | CATCAGCTTTATTTGTTCCT | 26 | 3344 |
| 1318579 | 12 | 31 | 997 | 1016 | CGGCCGTCCATCTTGGACCC | 80 | 3345 |
| 1318584 | 3554 | 3573 | 74416 | 74435 | AGCTGCTCCACCATGGGCAC | 98 | 3346 |
| 1318585 | N/A | N/A | 115063 | 115082 | TCTGTGTATCACCTTCCTCA | 51 | 3347 |
| 1318588 | N/A | N/A | 1630 | 1649 | GACAGGCCCCAACAAGGCTC | 94 | 3348 |
| 1318592 | 2121 | 2140 | N/A | N/A | AGGCTTGTTTTCTTGATCAC | 32 | 3349 |
| 1318595 | N/A | N/A | 1498 | 1517 | GGGTCACTCTGTCTCTGCGG | 86 | 3350 |
| 1318596 | N/A | N/A | 1442 | 1461 | GGTTACCGCCATCCCCGCCG | 78 | 3351 |
| 1318600 | 3213 | 3232 | N/A | N/A | TTCACAGCATCCAAATGTGA | 85 | 3352 |
| 1318601 | 5230 | 5249 | 114044 | 114063 | AGAGCTCCTGAATACGAGAA | 47 | 3353 |
| 1318602 | 161 | 180 | 1146 | 1165 | TCGAAGGCCTTCATCAGCTT | 97 | 3354 |
| 1318609 | 702 | 721 | 31684 | 31703 | AAACCTCCACAGGGCAGCAC | 66 | 3355 |
| 1318610 | 3218 | 3237 | 71456 | 71475 | AAAGCTTCACAGCATCCAAA | 55 | 3356 |
| 1318614 | N/A | N/A | 1609 | 1628 | GCCTCCCCTCGCGAGAGGAC | 98 | 3357 |
| 1318615 | 4701 | 4720 | 104688 | 104707 | GAGCTGAATGATTTTAGGAA | 21 | 3358 |
| 1318621 | 4933 | 4952 | 108690 | 108709 | CTTCATTCTCCTTGTGGCAC | 40 | 3359 |
| 1318622 | 4593 | 4612 | 103670 | 103689 | GAACTGGCCCACTTCAATGT | 53 | 3360 |
| 1318627 | N/A | N/A | 101088 | 101107 | TTACCTTATCTGCACGGTTC | 72 | 3361 |
| 1318632 | 4827 | 4846 | 106882 | 106901 | TTCAAGCTCTTTTCCTGCAT | 33 | 3362 |
| 1318638 | 4043 | 4062 | 98651 | 98670 | TCTCGACTAAAGCAGGATTT | 34 | 3363 |
| 1318640 | 4562 | 4581 | 103639 | 103658 | TTCAATACAAAGCCAATAAA | 84 | 3364 |
| 1318642 | 4513 | 4532 | 101366 | 101385 | TAACCCGTAACTGAACCAGC | 52 | 3365 |
| 1318645 | 5529 | 5548 | 126045 | 126064 | GGCAGCTGCTGTGATTCTCC | 79 | 3366 |
| 1318648 | 4565 | 4584 | 103642 | 103661 | TGTTTCAATACAAAGCCAAT | 66 | 3367 |
| 1318653 | 5804 | 5823 | 130387 | 130406 | CTATTGCACATTCCAAGTTT | 80 | 3368 |
| 1318656 | 386 | 405 | 1365 | 1384 | AGCGGCTCCTCAGCCACAGC | 98 | 3369 |
| 1318660 | 7721 | 7740 | 149809 | 149828 | TGCTGCTCCAAGCAGCTTAC | 93 | 3370 |
| 1318663 | 6770 | 6789 | N/A | N/A | GCAGCATCCCCAAACAGATC | 76 | 3371 |
| 1318666 | 6767 | 6786 | N/A | N/A | GCATCCCCAAACAGATCATT | 85 | 3372 |
| 1318670 | 7392 | 7411 | N/A | N/A | CCATCCAAGCTTCCACACCA | 79 | 3373 |
| 1318672 | 7387 | 7406 | N/A | N/A | CAAGCTTCCACACCAGTGGG | 85 | 3374 |
| 1318674 | 6777 | 6796 | N/A | N/A | ATACAGTGCAGCATCCCCAA | 89 | 3375 |
| 1318677 | 6774 | 6793 | N/A | N/A | CAGTGCAGCATCCCCAAACA | 71 | 3376 |
| 1318678 | 7833 | 7852 | 150352 | 150371 | ATTCTCTCTCTTTGAAACCA | 35 | 3377 |
| 1318680 | 9767 | 9786 | 166516 | 166535 | CCAGGACTGCAGACACTCCC | 75 | 3378 |
| 1318681 | N/A | N/A | 141020 | 141039 | ACAAATGCACAGATGAAAAC | 80 | 3379 |
| 1318684 | 7829 | 7848 | 150348 | 150367 | TCTCTCTTTGAAACCATTGC | 41 | 3380 |
| 1318686 | 6153 | 6172 | 133214 | 133233 | CATGCGAGCCAGCACACGGA | 56 | 3381 |
| 1318691 | 4832 | 4851 | 106887 | 106906 | TGGGTTTCAAGCTCTTTTCC | 46 | 3382 |
| 1318696 | 4864 | 4883 | 106919 | 106938 | GTCTCAGTAACATTGACACC | 96 | 3383 |
| 1318697 | 7180 | 7199 | 141490 | 141509 | TGTTTGGATCTACTTCCTCC | 69 | 3384 |
| 1318703 | 4855 | 4874 | 106910 | 106929 | ACATTGACACCACCACCTCT | 73 | 3385 |
| 1318705 | 4952 | 4971 | 108709 | 108728 | GACAGTCGCTTCCACTTGTC | 70 | 3386 |
| 1318706 | N/A | N/A | 115060 | 115079 | GTGTATCACCTTCCTCACTG | 78 | 3387 |
| 1318708 | N/A | N/A | 104599 | 104618 | TGATTGCCTCTGATTCCCTA | 23 | 3388 |
| 1318710 | 157 | 176 | 1142 | 1161 | AGGCCTTCATCAGCTTTTCC | 92 | 3389 |
| 1318715 | 4622 | 4641 | 104609 | 104628 | ATGTTTGGAATGATTGCCTC | 28 | 3390 |
| 1318724 | 5507 | 5526 | N/A | N/A | AACATTCCAGACTTGAAGAT | 79 | 3391 |
| 1318725 | 706 | 725 | 31688 | 31707 | CAGCAAACCTCCACAGGGCA | 46 | 3392 |
| 1318727 | 6788 | 6807 | 138876 | 138895 | GGCAGGGACTGATACAGTGC | 66 | 3393 |
| 1318731 | 4569 | 4588 | 103646 | 103665 | AAACTGTTTCAATACAAAGC | 51 | 3394 |
| 1318733 | 4506 | 4525 | 101359 | 101378 | TAACTGAACCAGCTGCGCCA | 80 | 3395 |
| 1318734 | 4873 | 4892 | 106928 | 106947 | ACTGGATGAGTCTCAGTAAC | 74 | 3396 |
| 1318740 | 2790 | 2809 | 62214 | 62233 | TTTTGCCTCCAAAAAGCTCA | 27 | 3397 |
| 1318746 | 4738 | 4757 | 104725 | 104744 | TCACAGCCTTCCTTCCACTG | 76 | 3398 |

TABLE 46
Reduction of HTT RNA by 5-10-5 MOE gapmers with mixed PO/PS internucleoside
linkages in A431 cells

| | SEQ | SEQ | SEQ | SEQ | | | |
|---|---|---|---|---|---|---|---|
| | ID No: | ID No: | ID No: | ID No: | | HTT | SEQ |
| Compound | 1 Start | 1 Stop | 2 Start | 2 Stop | | (% | ID |
| Number | Site | Site | Site | Site | Sequence (5′ to 3′) | UTC) | NO |
| 388241 | 4862 | 4881 | 106917 | 106936 | CTCAGTAACATTGACACCAC | 43 | 858 |
| 1231501 | 4277 | 4296 | 99395 | 99414 | TCCGCCTGCACCATGTTCCT | 82 | 3399 |
| 1231516 | 4604 | 4623 | N/A | N/A | TCTGATTCCCTGAACTGGCC | 77 | 3400 |
| 1315878 | 5806 | 5825 | 130389 | 130408 | CTCTATTGCACATTCCAAGT | 29 | 3401 |
| 1315892 | N/A | N/A | 1441 | 1460 | GTTACCGCCATCCCCGCCGT | 91 | 3402 |
| 1315898 | 4608 | 4627 | N/A | N/A | TGCCTCTGATTCCCTGAACT | 55 | 3403 |
| 1316129 | N/A | N/A | 115065 | 115084 | TCTCTGTGTATCACCTTCCT | 67 | 3404 |
| 1316143 | 5801 | 5820 | 130384 | 130403 | TTGCACATTCCAAGTTTGGC | 34 | 3405 |
| 1316282 | 6769 | 6788 | N/A | N/A | CAGCATCCCCAAACAGATCA | 84 | 3406 |
| 1316297 | N/A | N/A | 1629 | 1648 | ACAGGCCCCAACAAGGCTCT | 84 | 3407 |
| 1316325 | 2123 | 2142 | N/A | N/A | CAAGGCTTGTTTTCTTGATC | 57 | 3408 |
| 1316430 | 6152 | 6171 | 133213 | 133232 | ATGCGAGCCAGCACACGGAA | 76 | 3409 |
| 1316552 | 2829 | 2848 | 62253 | 62272 | CCCTGTATAATGATGAGCCC | 17† | 3410 |
| 1317030 | 4822 | 4841 | 106877 | 106896 | GCTCTTTTCCTGCATCAGCT | 57 | 3411 |
| 1317131 | 4511 | 4530 | 101364 | 101383 | ACCCGTAACTGAACCAGCTG | 70 | 3412 |
| 1317175 | 4564 | 4583 | 103641 | 103660 | GTTTCAATACAAAGCCAATA | 36 | 3413 |
| 1318567 | N/A | N/A | 1444 | 1463 | AGGGTTACCGCCATCCCCGC | 84 | 3414 |
| 1318570 | 4735 | 4754 | 104722 | 104741 | CAGCCTTCCTTCCACTGGCC | 104 | 3415 |
| 1318574 | N/A | N/A | 1436 | 1455 | CGCCATCCCCGCCGTAGCCT | 83 | 3416 |
| 1318575 | N/A | N/A | 1466 | 1485 | GTGTCGCCGGCCCGCAGGCT | 80 | 3417 |
| 1318576 | 966 | 985 | 41676 | 41695 | GCAGATGCTCACTGCTGATC | 76 | 3418 |
| 1318577 | 4812 | 4831 | 106867 | 106886 | TGCATCAGCTTTATTTGTTC | 62 | 3419 |
| 1318578 | 11 | 30 | 996 | 1015 | GGCCGTCCATCTTGGACCCG | 93 | 3420 |
| 1318580 | N/A | N/A | 115062 | 115081 | CTGTGTATCACCTTCCTCAC | 62 | 3421 |
| 1318582 | 3556 | 3575 | 74418 | 74437 | AGAGCTGCTCCACCATGGGC | 83 | 3422 |
| 1318587 | N/A | N/A | 1503 | 1522 | TTGCTGGGTCACTCTGTCTC | 64 | 3423 |
| 1318593 | N/A | N/A | 1632 | 1651 | AGGACAGGCCCCAACAAGGC | 73 | 3424 |
| 1318598 | 160 | 179 | 1145 | 1164 | CGAAGGCCTTCATCAGCTTT | 82 | 3425 |
| 1318599 | 5233 | 5252 | 114047 | 114066 | AGGAGAGCTCCTGAATACGA | 45 | 3426 |
| 1318603 | 5229 | 5248 | 114043 | 114062 | GAGCTCCTGAATACGAGAAA | 64 | 3427 |
| 1318604 | 4615 | 4634 | 104602 | 104621 | GAATGATTGCCTCTGATTCC | 48 | 3428 |
| 1318607 | 165 | 184 | 1150 | 1169 | GGACTCGAAGGCCTTCATCA | 81 | 3429 |
| 1318613 | 704 | 723 | 31686 | 31705 | GCAAACCTCCACAGGGCAGC | 83 | 3430 |
| 1318617 | 3217 | 3236 | N/A | N/A | AAGCTTCACAGCATCCAAAT | 82 | 3431 |
| 1318623 | 4932 | 4951 | 108689 | 108708 | TTCATTCTCCTTGTGGCACT | 41 | 3432 |
| 1318624 | 4716 | 4735 | 104703 | 104722 | CATGATGCCATCACAGAGCT | 57 | 3433 |
| 1318625 | 4592 | 4611 | 103669 | 103688 | AACTGGCCCACTTCAATGTA | 73 | 3434 |
| 1318626 | 4712 | 4731 | 104699 | 104718 | ATGCCATCACAGAGCTGAAT | 71 | 3435 |
| 1318630 | 4867 | 4886 | 106922 | 106941 | TGAGTCTCAGTAACATTGAC | 62 | 3436 |
| 1318631 | 129 | 148 | 1114 | 1133 | CATGGCGGTCTCCCGCCCGG | 55 | 3437 |
| 1318633 | 388 | 407 | 1367 | 1386 | GCAGCGGCTCCTCAGCCACA | 86 | 3438 |
| 1318636 | 4819 | 4838 | 106874 | 106893 | CTTTTCCTGCATCAGCTTTA | 48 | 3439 |
| 1318637 | 126 | 145 | 1111 | 1130 | GGCGGTCTCCCGCCCGGCAC | 89 | 3440 |
| 1318641 | 4613 | 4632 | 104600 | 104619 | ATGATTGCCTCTGATTCCCT | 30 | 3441 |
| 1318643 | 5525 | 5544 | 126041 | 126060 | GCTGCTGTGATTCTCCGGAA | 46 | 3442 |
| 1318649 | 6786 | 6805 | 138874 | 138893 | CAGGGACTGATACAGTGCAG | 72 | 3443 |
| 1318654 | 8664 | 8683 | 161610 | 161629 | AGGATAGTTCTCAATGAGGT | 41 | 3444 |
| 1318655 | 4567 | 4586 | 103644 | 103663 | ACTGTTTCAATACAAAGCCA | 59 | 3445 |
| 1318661 | 6772 | 6791 | N/A | N/A | GTGCAGCATCCCCAAACAGA | 84 | 3446 |
| 1318665 | 6766 | 6785 | N/A | N/A | CATCCCCAAACAGATCATTC | 96 | 3447 |
| 1318667 | 9789 | 9808 | 166538 | 166557 | GAAGGCCTCAGGCTCAGCCC | 90 | 3448 |
| 1318668 | 7723 | 7742 | 149811 | 149830 | GCTGCTGCTCCAAGCAGCTT | 88 | 3449 |
| 1318671 | 7390 | 7409 | N/A | N/A | ATCCAAGCTTCCACACCAGT | 87 | 3450 |
| 1318673 | 6776 | 6795 | N/A | N/A | TACAGTGCAGCATCCCCAAA | 72 | 3451 |
| 1318675 | 4863 | 4882 | 106918 | 106937 | TCTCAGTAACATTGACACCA | 43 | 3452 |
| 1318682 | N/A | N/A | 141016 | 141035 | ATGCACAGATGAAAACAATT | 82 | 3453 |
| 1318685 | 7832 | 7851 | 150351 | 150370 | TTCTCTCTCTTTGAAACCAT | 37 | 3454 |
| 1318688 | 7184 | 7203 | 141494 | 141513 | TGTGTGTTTGGATCTACTTC | 59 | 3455 |
| 1318695 | 4829 | 4848 | 106884 | 106903 | GTTTCAAGCTCTTTTCCTGC | 26 | 3456 |
| 1318699 | 2793 | 2812 | 62217 | 62236 | TGCTTTTGCCTCCAAAAAGC | 43† | 3457 |
| 1318701 | 4857 | 4876 | 106912 | 106931 | TAACATTGACACCACCACCT | 38 | 3458 |
| 1318713 | 3552 | 3571 | 74414 | 74433 | CTGCTCCACCATGGGCACCA | 99 | 3459 |
| 1318717 | 102 | 121 | 1087 | 1106 | GTCCCCGGAGGCCTCGGGCC | 92 | 3460 |
| 1318718 | 988 | 1007 | 41698 | 41717 | ATTGTGTCCTTCTTGAGTGC | 57 | 3461 |
| 1318719 | 385 | 404 | 1364 | 1383 | GCGGCTCCTCAGCCACAGCC | 107 | 3462 |
| 1318720 | N/A | N/A | 101091 | 101110 | CATTTACCTTATCTGCACGG | 89 | 3463 |
| 1318721 | 4389 | 4408 | N/A | N/A | ATGAATAGCATTCTTATCTG | 54 | 3464 |
| 1318723 | 4698 | 4717 | 104685 | 104704 | CTGAATGATTTTAGGAATTC | 52 | 3465 |
| 1318726 | 4047 | 4066 | 98655 | 98674 | TGGTTCTCGACTAAAGCAGG | 27 | 3466 |
| 1318729 | 7624 | 7643 | 149712 | 149731 | TCTGGGTCCTCTCTGTGTCT | 62 | 3467 |
| 1318732 | 4559 | 4578 | 103636 | 103655 | AATACAAAGCCAATAAACAC | 79 | 3468 |
| 1318737 | 4950 | 4969 | 108707 | 108726 | CAGTCGCTTCCACTTGTCTT | 66 | 3469 |
| 1318738 | 4853 | 4872 | 106908 | 106927 | ATTGACACCACCACCTCTTT | 99 | 3470 |
| 1318739 | 7178 | 7197 | 141488 | 141507 | TTTGGATCTACTTCCTCCTC | 87 | 3471 |
| 1318742 | 5813 | 5832 | 130396 | 130415 | ACTATTTCTCTATTGCACAT | 34 | 3472 |
| 1318743 | 7836 | 7855 | 150355 | 150374 | AATATTCTCTCTCTTTGAAA | 98 | 3473 |
| 1318744 | 7826 | 7845 | 150345 | 150364 | CTCTTTGAAACCATTGCTTG | 63 | 3474 |
| 1318747 | 4809 | 4828 | 106864 | 106883 | ATCAGCTTTATTTGTTCCTC | 33 | 3475 |

TABLE 47
Reduction of HTT RNA by 5-10-5 MOE gapmers with mixed PO/PS internucleoside
linkages in A431 cells

| | SEQ | SEQ | SEQ | SEQ | | | |
|---|---|---|---|---|---|---|---|
| | ID No: | ID No: | ID No: | ID No: | | HTT | SEQ |
| Compound | 1 Start | 1 Stop | 2 Start | 2 Stop | | (% | ID |
| Number | Site | Site | Site | Site | Sequence (5′ to 3′) | UTC) | NO |
| 388241 | 4862 | 4881 | 106917 | 106936 | CTCAGTAACATTGACACCAC | 42 | 858 |
| 627246 | 4862 | 4881 | 106917 | 106936 | CTCAGTAACATTGACACCAC | 67 | 858 |
| 1231517 | 4607 | 4626 | N/A | N/A | GCCTCTGATTCCCTGAACTG | 57 | 3476 |
| 1231536 | 5812 | 5831 | 130395 | 130414 | CTATTTCTCTATTGCACATT | 45 | 3477 |
| 1315904 | 968 | 987 | 41678 | 41697 | TGGCAGATGCTCACTGCTGA | 89 | 3478 |
| 1316055 | N/A | N/A | 1443 | 1462 | GGGTTACCGCCATCCCCGCC | 94 | 3479 |
| 1316138 | N/A | N/A | 1502 | 1521 | TGCTGGGTCACTCTGTCTCT | 77 | 3480 |
| 1316364 | 6775 | 6794 | N/A | N/A | ACAGTGCAGCATCCCCAAAC | 71 | 3481 |
| 1316386 | 7389 | 7408 | N/A | N/A | TCCAAGCTTCCACACCAGTG | 80 | 3482 |
| 1316513 | 7831 | 7850 | 150350 | 150369 | TCTCTCTCTTTGAAACCATT | 39 | 3483 |
| 1316596 | 162 | 181 | 1147 | 1166 | CTCGAAGGCCTTCATCAGCT | 98 | 3484 |
| 1316624 | 5231 | 5250 | 114045 | 114064 | GAGAGCTCCTGAATACGAGA | 54 | 3485 |
| 1317002 | 390 | 409 | 1369 | 1388 | GTGCAGCGGCTCCTCAGCCA | 80 | 3486 |
| 1317142 | 4610 | 4629 | N/A | N/A | ATTGCCTCTGATTCCCTGAA | 25 | 3487 |
| 1318566 | 4821 | 4840 | 106876 | 106895 | CTCTTTTCCTGCATCAGCTT | 47 | 3488 |
| 1318571 | 4734 | 4753 | 104721 | 104740 | AGCCTTCCTTCCACTGGCCA | 89 | 3489 |
| 1318572 | 965 | 984 | 41675 | 41694 | CAGATGCTCACTGCTGATCC | 60 | 3490 |
| 1318573 | 4811 | 4830 | 106866 | 106885 | GCATCAGCTTTATTTGTTCC | 39 | 3491 |
| 1318581 | N/A | N/A | 1440 | 1459 | TTACCGCCATCCCCGCCGTA | 102 | 3492 |
| 1318583 | 3555 | 3574 | 74417 | 74436 | GAGCTGCTCCACCATGGGCA | 92 | 3493 |
| 1318586 | N/A | N/A | 115064 | 115083 | CTCTGTGTATCACCTTCCTC | 47 | 3494 |
| 1318589 | N/A | N/A | 1631 | 1650 | GGACAGGCCCCAACAAGGCT | 87 | 3495 |
| 1318590 | 159 | 178 | 1144 | 1163 | GAAGGCCTTCATCAGCTTTT | 91 | 3496 |
| 1318591 | 4276 | 4295 | 99394 | 99413 | CCGCCTGCACCATGTTCCTC | 78 | 3497 |
| 1318594 | 2122 | 2141 | N/A | N/A | AAGGCTTGTTTTCTTGATCA | 36 | 3498 |
| 1318597 | N/A | N/A | 1447 | 1466 | TGCAGGGTTACCGCCATCCC | 91 | 3499 |
| 1318605 | 4614 | 4633 | 104601 | 104620 | AATGATTGCCTCTGATTCCC | 26 | 3500 |
| 1318606 | 109 | 128 | 1094 | 1113 | CACGGCAGTCCCCGGAGGCC | 91 | 3501 |
| 1318608 | 3214 | 3233 | N/A | N/A | CTTCACAGCATCCAAATGTG | 91 | 3502 |
| 1318611 | 4603 | 4622 | N/A | N/A | CTGATTCCCTGAACTGGCCC | 58 | 3503 |
| 1318612 | 4706 | 4725 | 104693 | 104712 | TCACAGAGCTGAATGATTTT | 58 | 3504 |
| 1318616 | 703 | 722 | 31685 | 31704 | CAAACCTCCACAGGGCAGCA | 68 | 3505 |
| 1318618 | 4934 | 4953 | 108691 | 108710 | TCTTCATTCTCCTTGTGGCA | 52 | 3506 |
| 1318619 | 4715 | 4734 | 104702 | 104721 | ATGATGCCATCACAGAGCTG | 54 | 3507 |
| 1318620 | 4383 | 4402 | N/A | N/A | AGCATTCTTATCTGCACGGT | 24 | 3508 |
| 1318628 | 387 | 406 | 1366 | 1385 | CAGCGGCTCCTCAGCCACAG | 97 | 3509 |
| 1318629 | 4386 | 4405 | N/A | N/A | AATAGCATTCTTATCTGCAC | 43 | 3510 |
| 1318634 | 4818 | 4837 | 106873 | 106892 | TTTTCCTGCATCAGCTTTAT | 75 | 3511 |
| 1318635 | 128 | 147 | 1113 | 1132 | ATGGCGGTCTCCCGCCCGGC | 87 | 3512 |
| 1318639 | 4563 | 4582 | 103640 | 103659 | TTTCAATACAAAGCCAATAA | 75 | 3513 |
| 1318644 | 4045 | 4064 | 98653 | 98672 | GTTCTCGACTAAAGCAGGAT | 41 | 3514 |
| 1318646 | 4508 | 4527 | 101361 | 101380 | CGTAACTGAACCAGCTGCGC | 65 | 3515 |
| 1318647 | 5524 | 5543 | 126040 | 126059 | CTGCTGTGATTCTCCGGAAC | 46 | 3516 |
| 1318650 | 6785 | 6804 | 138873 | 138892 | AGGGACTGATACAGTGCAGC | 58 | 3517 |
| 1318651 | 8663 | 8682 | 161609 | 161628 | GGATAGTTCTCAATGAGGTA | 49 | 3518 |
| 1318652 | 5805 | 5824 | 130388 | 130407 | TCTATTGCACATTCCAAGTT | 48 | 3519 |
| 1318657 | 4566 | 4585 | 103643 | 103662 | CTGTTTCAATACAAAGCCAA | 43 | 3520 |
| 1318658 | 7722 | 7741 | 149810 | 149829 | CTGCTGCTCCAAGCAGCTTA | 97 | 3521 |
| 1318659 | 9788 | 9807 | 166537 | 166556 | AAGGCCTCAGGCTCAGCCCC | 97 | 3522 |
| 1318662 | 6771 | 6790 | N/A | N/A | TGCAGCATCCCCAAACAGAT | 74 | 3523 |
| 1318664 | 6768 | 6787 | N/A | N/A | AGCATCCCCAAACAGATCAT | 110 | 3524 |
| 1318669 | 6151 | 6170 | 133212 | 133231 | TGCGAGCCAGCACACGGAAA | 73 | 3525 |
| 1318676 | 7725 | 7744 | 149813 | 149832 | GGGCTGCTGCTCCAAGCAGC | 70 | 3526 |
| 1318679 | N/A | N/A | 141021 | 141040 | TACAAATGCACAGATGAAAA | 78 | 3527 |
| 1318683 | N/A | N/A | 141015 | 141034 | TGCACAGATGAAAACAATTA | 91 | 3528 |
| 1318687 | 7834 | 7853 | 150353 | 150372 | TATTCTCTCTCTTTGAAACC | 69 | 3529 |
| 1318689 | 7181 | 7200 | 141491 | 141510 | GTGTTTGGATCTACTTCCTC | 53 | 3530 |
| 1318690 | 4828 | 4847 | 106883 | 106902 | TTTCAAGCTCTTTTCCTGCA | 42 | 3531 |
| 1318692 | 2792 | 2811 | 62216 | 62235 | GCTTTTGCCTCCAAAAAGCT | 61† | 3532 |
| 1318693 | 4865 | 4884 | 106920 | 106939 | AGTCTCAGTAACATTGACAC | 76 | 3533 |
| 1318694 | 4922 | 4941 | 108679 | 108698 | TTGTGGCACTGCTGCAGGAC | 69 | 3534 |
| 1318698 | 4676 | 4695 | 104663 | 104682 | ATGATCTGTTTTGAATGATA | 26 | 3535 |
| 1318700 | 4953 | 4972 | 108710 | 108729 | AGACAGTCGCTTCCACTTGT | 55 | 3536 |
| 1318702 | 4856 | 4875 | 106911 | 106930 | AACATTGACACCACCACCTC | 79 | 3537 |
| 1318704 | 2798 | 2817 | 62222 | 62241 | TTTTCTGCTTTTGCCTCCAA | 22† | 3538 |
| 1318707 | 14 | 33 | 999 | 1018 | AGCGGCCGTCCATCTTGGAC | 96 | 3539 |
| 1318709 | N/A | N/A | 1624 | 1643 | CCCCAACAAGGCTCTGCCTC | 78 | 3540 |
| 1318711 | 5693 | 5712 | 126209 | 126228 | ACTTCTGCCCACCAGCGGTA | 83 | 3541 |
| 1318712 | N/A | N/A | 115061 | 115080 | TGTGTATCACCTTCCTCACT | 73 | 3542 |
| 1318714 | 4 | 23 | 989 | 1008 | CATCTTGGACCCGTCCCGGC | 92 | 3543 |
| 1318716 | 3220 | 3239 | 71458 | 71477 | ACAAAGCTTCACAGCATCCA | 60 | 3544 |
| 1318722 | 4590 | 4609 | 103667 | 103686 | CTGGCCCACTTCAATGTATT | 89 | 3545 |
| 1318728 | 7614 | 7633 | N/A | N/A | CTCTGTGTCTTCTTCTGGTG | 86 | 3546 |
| 1318730 | 384 | 403 | 1363 | 1382 | CGGCTCCTCAGCCACAGCCG | 86 | 3547 |
| 1318735 | 4516 | 4535 | 101369 | 101388 | AATTAACCCGTAACTGAACC | 58 | 3548 |
| 1318736 | 6764 | 6783 | N/A | N/A | TCCCCAAACAGATCATTCAA | 88 | 3549 |
| 1318741 | 4836 | 4855 | 106891 | 106910 | TTTTTGGGTTTCAAGCTCTT | 48 | 3550 |
| 1318745 | 4808 | 4827 | 106863 | 106882 | TCAGCTTTATTTGTTCCTCT | 25 | 3551 |

[0490] Example 4: Dose-Dependent Inhibition of Human HTT in HepG2 Cells by Modified Oligonucleotides Modified oligonucleotides selected from the examples above were tested at various doses in HepG2 cells. Cultured HepG2 cells at a density of 20,000 cells per well were treated by electroporation with various concentrations of modified oligonucleotide as specified in the tables below. After a treatment period of approximately 24 hours, total RNA was isolated from the cells and HTT RNA levels were measured by quantitative real-time RTPCR. Human HTT primer-probe set RTS2617 (described herein above) was used to measure RNA levels as described above. HTT RNA levels were normalized to total RNA content, as measured by RIBOGREEN®. Reduction of HTT RNA is presented in the tables below as percent HTT RNA, relative to the amount of HTT RNA in untreated control cells (% UTC).

[0491] The half maximal inhibitory concentration (IC₅₀) of each modified oligonucleotide was calculated using a linear regression on a log/linear plot of the data in Excel and is also presented in the tables below.

TABLE 48
Dose-dependent reduction of human HTT RNA
in HepG2 cells by modified oligonucleotides

| Compound | HTT RNA (% UTC) | | | | | IC50 |
|---|---|---|---|---|---|---|
| No. | 62 nM | 185 nM | 556 nM | 1667 nM | 5000 nM | (μM) |
| 387916 | 100 | 94 | 90 | 58 | 34 | 2.87 |
| 646210 | 83 | 80 | 70 | 50 | 29 | 1.47 |
| 646211 | 85 | 70 | 51 | 34 | 12 | 0.57 |
| 646214 | 103 | 99 | 77 | 57 | 29 | 2.10 |
| 646215 | 92 | 94 | 74 | 68 | 36 | 3.48 |
| 646218 | 105 | 81 | 54 | 33 | 16 | 0.82 |
| 646219 | 86 | 88 | 68 | 48 | 21 | 1.23 |
| 646221 | 104 | 86 | 69 | 42 | 33 | 1.48 |
| 646222 | 102 | 97 | 71 | 46 | 32 | 1.71 |
| 646259 | 94 | 85 | 77 | 55 | 27 | 1.80 |
| 646264 | 96 | 88 | 76 | 47 | 41 | 2.27 |
| 646265 | 98 | 103 | 71 | 43 | 21 | 1.32 |
| 646284 | 93 | 89 | 69 | 57 | 35 | 2.20 |
| 646311 | 94 | 100 | 61 | 47 | 26 | 1.38 |
| 646344 | 92 | 69 | 57 | 30 | 14 | 0.64 |

TABLE 49
Dose-dependent reduction of human HTT RNA
in HepG2 cells by modified oligonucleotides

| Compound | HTT RNA (% UTC) | | | | | IC50 |
|---|---|---|---|---|---|---|
| No. | 62 nM | 185 nM | 556 nM | 1667 nM | 5000 nM | (μM) |
| 387916 | 103 | 98 | 89 | 42 | 28 | 1.82 |
| 646287 | 112 | 106 | 100 | 80 | 56 | >5 |
| 646301 | 99 | 76 | 37 | 28 | 13 | 0.57 |
| 646313 | 97 | 93 | 63 | 52 | 22 | 1.32 |
| 646342 | 114 | 98 | 74 | 52 | 26 | 1.72 |
| 646356 | 92 | 87 | 62 | 46 | 29 | 1.33 |
| 646364 | 98 | 93 | 74 | 40 | 18 | 1.18 |
| 646366 | 91 | 90 | 72 | 60 | 23 | 1.72 |
| 646370 | 94 | 102 | 72 | 38 | 20 | 1.23 |
| 646376 | 94 | 83 | 54 | 26 | 12 | 0.67 |
| 646384 | 97 | 97 | 81 | 50 | 43 | 2.99 |
| 646398 | 104 | 99 | 90 | 52 | 32 | 2.41 |
| 646401 | 95 | 81 | 69 | 36 | 14 | 0.89 |
| 646411 | 95 | 81 | 56 | 32 | 13 | 0.74 |
| 646412 | 105 | 84 | 52 | 25 | 12 | 0.71 |

### Example 5: Dose-Dependent Inhibition of Human HTT in A431 Cells by Modified Oligonucleotides

[0492] Modified oligonucleotides selected from the examples above were tested at various doses in A431 cells. Cultured A431 cells at a density of 10,000 cells per well were treated by free uptake with various concentrations of modified oligonucleotide as specified in the tables below. After a treatment period of approximately 48 hours, total RNA was isolated from the cells and HTT RNA levels were measured by quantitative real-time RTPCR. Human HTT primer-probe set RTS36485 (described herein above) was used to measure RNA levels as described above. HTT RNA levels were normalized to total RNA content, as measured by RIBOGREEN®. Reduction of HTT RNA is presented in the tables below as percent HTT RNA, relative to the amount of HTT RNA in untreated control cells (% UTC).

[0493] The half maximal inhibitory concentration (IC₅₀) of each modified oligonucleotide was calculated using a linear regression on a log/linear plot of the data in Excel and is also presented in the tables below.

TABLE 50
Dose-dependent reduction of human HTT RNA
in A431 cells by modified oligonucleotides

| Compound | HTT RNA (% UTC) | | | | IC50 |
|---|---|---|---|---|---|
| No. | 234 nM | 938 nM | 3750 nM | 15000 nM | (μM) |
| 387916 | 38 | 16 | 7 | 3 | <0.23 |
| 953845 | 102 | 83 | 59 | 58 | >15 |
| 953941 | 94 | 87 | 61 | 54 | >15 |
| 953957 | 127 | 117 | 115 | 116 | >15 |
| 953966 | 78 | 64 | 54 | 49 | 9.37 |
| 954021 | 78 | 57 | 43 | 32 | 2.36 |
| 954022 | 100 | 87 | 75 | 65 | >15 |
| 954030 | 74 | 55 | 41 | 39 | 2.42 |
| 954047 | 66 | 32 | 17 | 13 | 0.44 |
| 954085 | 113 | 105 | 92 | 81 | >15 |
| 954101 | 92 | 84 | 71 | 57 | >15 |
| 954118 | 88 | 73 | 62 | 49 | 13.74 |
| 954205 | 93 | 79 | 45 | 47 | 6.83 |
| 954238 | 72 | 66 | 44 | 31 | 2.52 |
| 954294 | 88 | 89 | 69 | 60 | >15 |
| 954317 | 99 | 89 | 61 | 47 | 11.37 |
| 954365 | 76 | 52 | 39 | 33 | 1.89 |
| 954366 | 92 | 74 | 54 | 48 | 8.77 |
| 954374 | 89 | 65 | 44 | 39 | 3.99 |

TABLE 51
Dose-dependent reduction of human HTT RNA
in A431 cells by modified oligonucleotides

| | HTT RNA (% UTC) | | | | IC50 |
|---|---|---|---|---|---|
| Compound No. | 234 nM | 938 nM | 3750 nM | 15000 nM | (μM) |
| 387916 | 37 | 14 | 6 | 3 | <0.23 |
| 953799 | 109 | 119 | 107 | 119 | >15 |
| 953871 | 112 | 101 | 83 | 74 | >15 |
| 953896 | 74 | 59 | 50 | 38 | 3.45 |
| 953905 | 111 | 87 | 61 | 33 | 6.44 |
| 953991 | 104 | 90 | 79 | 65 | >15 |
| 953993 | 102 | 83 | 84 | 72 | >15 |
| 954023 | 87 | 60 | 49 | 38 | 4.05 |
| 954033 | 94 | 80 | 58 | 58 | >15 |
| 954129 | 108 | 117 | 100 | 111 | >15 |
| 954135 | 121 | 110 | 117 | 107 | >15 |
| 954272 | 87 | 73 | 56 | 41 | 6.78 |
| 954288 | 102 | 90 | 73 | 62 | >15 |
| 954304 | 86 | 63 | 45 | 21 | 2.39 |
| 954313 | 104 | 94 | 76 | 58 | >15 |
| 954335 | 88 | 65 | 52 | 33 | 3.86 |
| 954343 | 90 | 63 | 44 | 36 | 3.62 |
| 954391 | 83 | 76 | 57 | 48 | 11.41 |
| 954392 | 88 | 84 | 74 | 73 | >15 |

TABLE 52
Dose-dependent reduction of human HTT RNA
in A431 cells by modified oligonucleotides

| | HTT RNA (% UTC) | | | | IC50 |
|---|---|---|---|---|---|
| Compound No. | 234 nM | 938 nM | 3750 nM | 15000 nM | (μM) |
| 387916 | 41 | 16 | 7 | 2 | <0.23 |
| 953906 | 71 | 74 | 65 | 49 | >15 |
| 953921 | 66 | 93 | 78 | 62 | >15 |
| 953954 | 75 | 62 | 52 | 36 | 3.76 |
| 953978 | 102 | 98 | 89 | 81 | >15 |
| 954027 | 77 | 63 | 35 | 24 | 1.81 |
| 954042 | 80 | 43 | 35 | 21 | 1.28 |
| 954058 | 102 | 87 | 75 | 56 | >15 |
| 954066 | 99 | 63 | 51 | 31 | 3.77 |
| 954081 | 96 | 95 | 66 | 47 | 13.91 |
| 954123 | 88 | 67 | 49 | 39 | 4.63 |
| 954185 | 106 | 102 | 110 | 114 | >15 |
| 954194 | 91 | 84 | 60 | 46 | 10.83 |
| 954266 | 69 | 64 | 51 | 44 | 5.69 |
| 954273 | 87 | 81 | 61 | 51 | >15 |
| 954274 | 79 | 66 | 52 | 49 | 8.19 |
| 954290 | 82 | 51 | 44 | 34 | 2.39 |
| 954329 | 86 | 91 | 82 | 78 | >15 |
| 954353 | 97 | 116 | 88 | 85 | >15 |

TABLE 53
Dose-dependent reduction of human HTT RNA
in A431 cells by modified oligonucleotides

| | HTT RNA (% UTC) | | | | IC50 |
|---|---|---|---|---|---|
| Compound No. | 234 nM | 938 nM | 3750 nM | 15000 nM | (μM) |
| 387916 | 39 | 14 | 5 | 2 | <0.23 |
| 388817 | 100 | 93 | 81 | 82 | >15 |
| 953827 | 87 | 87 | 65 | 69 | >15 |
| 953979 | 86 | 89 | 72 | 65 | >15 |
| 953980 | 94 | 81 | 77 | 56 | >15 |
| 954028 | 77 | 100 | 72 | 54 | >15 |
| 954035 | 100 | 88 | 74 | 59 | >15 |
| 954043 | 78 | 61 | 40 | 28 | 2.14 |
| 954044 | 68 | 49 | 32 | 27 | 1.03 |
| 954068 | 72 | 58 | 36 | 17 | 1.36 |
| 954204 | 110 | 93 | 77 | 57 | >15 |
| 954219 | 113 | 106 | 126 | 101 | >15 |
| 954299 | 95 | 79 | 75 | 101 | >15 |
| 954339 | 75 | 82 | 66 | 53 | >15 |
| 954364 | 65 | 45 | 41 | 28 | 1.00 |
| 954372 | 87 | 71 | 78 | 65 | >15 |
| 954395 | 102 | 106 | 78 | 91 | >15 |
| 954411 | 77 | 66 | 52 | 63 | >15 |
| 954412 | 104 | 98 | 77 | 68 | >15 |

[0494] Modified oligonucleotides selected from the examples above were tested at various doses in A431 cells. Cultured A431 cells at a density of 10,000 cells per well were treated by free uptake with various concentrations of modified oligonucleotide as specified in the tables below. After a treatment period of approximately 48 hours, total RNA was isolated from the cells and HTT RNA levels were measured by quantitative real-time RTPCR. Human HTT primer-probe set RTS36478 (described herein above) was used to measure RNA levels as described above. HTT RNA levels were normalized to total RNA content, as measured by RIBOGREEN®. Reduction of HTT RNA is presented in the tables below as percent HTT RNA, relative to the amount of HTT RNA in untreated control cells (% UTC).

[0495] The half maximal inhibitory concentration (IC₅₀) of each modified oligonucleotide was calculated using a linear regression on a log/linear plot of the data in Excel and is also presented in the tables below. N.D. in the tables below refers to instances where the value was Not Defined.

TABLE 54
Dose-dependent reduction of human HTT RNA
in A431 cells by modified oligonucleotides

| | HTT RNA (% UTC) | | | | IC50 |
|---|---|---|---|---|---|
| Compound No. | 63 nM | 250 nM | 1000 nM | 4000 nM | (μM) |
| 388241 | 85 | 61 | 39 | 24 | 0.59 |
| 1314541 | 60 | 38 | 22 | 12 | 0.11 |
| 1314544 | 71 | 41 | 26 | 14 | 0.20 |
| 1314723 | 57 | 37 | 19 | 10 | 0.09 |
| 1314943 | 73 | 44 | 27 | 17 | 0.24 |
| 1315039 | 67 | 45 | 28 | 16 | 0.20 |
| 1315041 | 70 | 47 | 33 | 19 | 0.26 |
| 1315074 | 32 | 15 | 9 | 9 | <0.06 |
| 1315123 | 71 | 42 | 30 | 15 | 0.23 |
| 1315615 | 78 | 63 | 41 | 29 | 0.63 |
| 1315692 | 56 | 31 | 20 | 11 | 0.07 |
| 1315698 | 71 | 47 | 29 | 18 | 0.25 |
| 1315847 | 73 | 53 | 34 | 21 | 0.35 |
| 1316080 | 99 | 71 | 49 | 29 | 1.02 |
| 1316096 | 81 | 55 | 39 | 25 | 0.50 |
| 1316234 | 79 | 55 | 36 | 18 | 0.41 |
| 1316312 | 47 | 26 | 16 | 10 | <0.06 |
| 1316500 | 84 | 60 | 38 | 21 | 0.53 |
| 1316679 | 81 | 55 | 34 | 18 | 0.41 |

TABLE 55
Dose-dependent reduction of human HTT RNA
in A431 cells by modified oligonucleotides

| | HTT RNA (% UTC) | | | | IC50 |
|---|---|---|---|---|---|
| Compound No. | 63 nM | 250 nM | 1000 nM | 4000 nM | (μM) |
| 388241 | 90 | 64 | 40 | 24 | 0.67 |
| 1314789 | 63 | 42 | 23 | 11 | 0.15 |
| 1314848 | 78 | 50 | 28 | 16 | 0.31 |
| 1315014 | 69 | 43 | 25 | 16 | 0.20 |
| 1315137 | 66 | 45 | 24 | 11 | 0.18 |
| 1315143 | 68 | 37 | 17 | 9 | 0.15 |
| 1315207 | 88 | 66 | 38 | 21 | 0.61 |
| 1315294 | 65 | 40 | 23 | 13 | 0.15 |
| 1315566 | 73 | 41 | 26 | 19 | 0.24 |
| 1315702 | 57 | 32 | 20 | 12 | 0.08 |
| 1315752 | 74 | 49 | 32 | 16 | 0.30 |
| 1315874 | 87 | 63 | 34 | 17 | 0.50 |
| 1316169 | 69 | 51 | 27 | 14 | 0.25 |
| 1316218 | 73 | 54 | 36 | 18 | 0.35 |
| 1316589 | 72 | 46 | 28 | 16 | 0.25 |
| 1316616 | 85 | 64 | 42 | 20 | 0.59 |
| 1316620 | 76 | 59 | 37 | 25 | 0.47 |
| 1316972 | 81 | 55 | 33 | 20 | 0.41 |
| 1317178 | 75 | 53 | 33 | 22 | 0.35 |

TABLE 56
Dose-dependent reduction of human HTT RNA
in A431 cells by modified oligonucleotides

| | HTT RNA (% UTC) | | | | IC50 |
|---|---|---|---|---|---|
| Compound No. | 63 nM | 250 nM | 1000 nM | 4000 nM | (μM) |
| 388241 | 72 | 63 | 40 | 25 | 0.50 |
| 1314696 | 84 | 54 | 30 | 31 | 0.43 |
| 1314810 | 42 | 25 | 14 | 10 | <0.06 |
| 1314894 | 96 | 85 | 77 | 35 | 2.75 |
| 1314930 | 75 | 51 | 38 | 23 | 0.38 |
| 1314999 | 55 | 35 | 21 | 13 | 0.08 |
| 1315027 | 77 | 50 | 30 | 20 | 0.33 |
| 1315155 | 65 | 44 | 36 | 24 | 0.22 |
| 1315174 | 74 | 46 | 32 | 15 | 0.27 |
| 1315556 | 64 | 42 | 38 | 24 | 0.21 |
| 1315578 | 62 | 39 | 22 | 11 | 0.13 |
| 1315808 | 100 | 75 | 57 | 40 | 1.71 |
| 1316170 | 74 | 54 | 33 | 21 | 0.36 |
| 1316535 | 71 | 52 | 44 | 34 | 0.51 |
| 1316563 | 46 | 26 | 15 | 9 | <0.06 |
| 1316725 | 73 | 50 | 31 | 17 | 0.29 |
| 1316768 | 112 | 61 | 43 | 30 | 0.91 |
| 1316803 | 78 | 58 | 37 | 30 | 0.54 |
| 1316893 | 101 | 86 | 81 | 58 | >4 |

TABLE 57
Dose-dependent reduction of human HTT RNA
in A431 cells by modified oligonucleotides

| | HTT RNA (% UTC) | | | | IC50 |
|---|---|---|---|---|---|
| Compound No. | 63 nM | 250 nM | 1000 nM | 4000 nM | (μM) |
| 388241 | 100 | 64 | 45 | 26 | 0.83 |
| 1314562 | 90 | 67 | 67 | 34 | 1.62 |
| 1314685 | 72 | 47 | 26 | 23 | 0.26 |
| 1314813 | 64 | 41 | 25 | 15 | 0.15 |
| 1314888 | 81 | 66 | 41 | 20 | 0.58 |
| 1315056 | 64 | 43 | 29 | 13 | 0.17 |
| 1315482 | 90 | 47 | 27 | 15 | 0.37 |
| 1315558 | 96 | 104 | 85 | 77 | >4 |
| 1315781 | 96 | 65 | 45 | 27 | 0.82 |
| 1315803 | 79 | 62 | 43 | 26 | 0.59 |
| 1316274 | 74 | 56 | 40 | 26 | 0.47 |
| 1316324 | 85 | 62 | 45 | 31 | 0.77 |
| 1316938 | 95 | 73 | 62 | 58 | >4 |
| 1317061 | 82 | 48 | 38 | 19 | 0.40 |
| 1317115 | 75 | 53 | 37 | 23 | 0.39 |
| 1317128 | 79 | 59 | 31 | 16 | 0.40 |
| 1317163 | 87 | 65 | 47 | 25 | 0.76 |
| 1317190 | 106 | 95 | 88 | 79 | >4 |
| 1317205 | 75 | 47 | 27 | 13 | 0.27 |

TABLE 58
Dose-dependent reduction of human HTT RNA
in A431 cells by modified oligonucleotides

| | HTT RNA (% UTC) | | | | IC50 |
|---|---|---|---|---|---|
| Compound No. | 63 nM | 250 nM | 1000 nM | 4000 nM | (μM) |
| 388241 | 86 | 49 | 33 | 18 | 0.40 |
| 1314548 | 80 | 58 | 28 | 11 | 0.36 |
| 1314650 | 59 | 31 | 23 | 11 | 0.09 |
| 1314744 | 61 | 42 | 25 | 15 | 0.14 |
| 1314824 | 68 | 49 | 31 | 18 | 0.25 |
| 1314964 | 79 | 57 | 35 | 20 | 0.43 |
| 1314982 | 87 | 47 | 29 | 20 | 0.39 |
| 1315234 | 74 | 52 | 29 | 18 | 0.31 |
| 1315321 | 46 | 23 | 13 | 9 | <0.06 |
| 1315447 | 69 | 43 | 30 | 23 | 0.23 |
| 1315636 | 77 | 48 | 31 | 16 | 0.31 |
| 1315877 | 72 | 45 | 23 | 10 | 0.22 |
| 1315886 | 93 | 72 | 64 | 63 | >4 |
| 1315921 | 38 | 16 | 8 | 4 | <0.06 |
| 1316310 | 75 | 50 | 31 | 16 | 0.31 |
| 1316551 | 84 | 43 | 28 | 14 | 0.31 |
| 1316772 | 93 | 63 | 37 | 21 | 0.61 |
| 1317204 | 72 | 48 | 29 | 15 | 0.26 |
| 1317227 | 73 | 44 | 27 | 15 | 0.24 |

TABLE 59
Dose-dependent reduction of human HTT RNA
in A431 cells by modified oligonucleotides

| | HTT RNA (% UTC) | | | | IC50 |
|---|---|---|---|---|---|
| Compound No. | 63 nM | 250 nM | 1000 nM | 4000 nM | (μM) |
| 388241 | 77 | 65 | 42 | 23 | 0.56 |
| 1314487 | 54 | 35 | 18 | 10 | 0.07 |
| 1314570 | 71 | 47 | 36 | 20 | 0.29 |
| 1314596 | 78 | 61 | 33 | 22 | 0.45 |
| 1314899 | 79 | 54 | 30 | 20 | 0.38 |
| 1314904 | 60 | 35 | 24 | 15 | 0.11 |
| 1315562 | 69 | 50 | 30 | 21 | 0.26 |
| 1315672 | 55 | 34 | 18 | 11 | 0.08 |
| 1315733 | 76 | 48 | 32 | 23 | 0.33 |
| 1315747 | 67 | 45 | 35 | 19 | 0.24 |
| 1315754 | 70 | 45 | 29 | 14 | 0.23 |
| 1315964 | 44 | 24 | 16 | 8 | <0.06 |
| 1316061 | 70 | 49 | 31 | 26 | 0.29 |
| 1316098 | 72 | 49 | 32 | 19 | 0.28 |
| 1316154 | 66 | 47 | 30 | 15 | 0.22 |
| 1316254 | 89 | 52 | 33 | 23 | 0.48 |
| 1316604 | 47 | 28 | 14 | 19 | <0.06 |
| 1316716 | 65 | 45 | 27 | 20 | 0.19 |
| 1316965 | 78 | 55 | 32 | 18 | 0.38 |

TABLE 60
Dose-dependent reduction of human HTT RNA
in A431 cells by modified oligonucleotides

| | HTT RNA (% UTC) | | | | IC50 |
|---|---|---|---|---|---|
| Compound No. | 63 nM | 250 nM | 1000 nM | 4000 nM | (μM) |
| 388241 | 85 | 107 | 51 | 26 | 1.30 |
| 1314791 | 106 | 66 | 46 | 34 | 1.07 |
| 1314822 | 77 | 79 | 41 | 22 | 0.76 |
| 1314849 | 42 | 24 | 12 | 8 | <0.06 |
| 1315621 | 105 | 60 | 38 | 20 | 0.66 |
| 1315723 | 67 | 46 | 29 | N.D. | 0.20 |
| 1315867 | 52 | 36 | 22 | 12 | 0.07 |
| 1315881 | 90 | 55 | 46 | 29 | 0.74 |
| 1315883 | 70 | 55 | N.D. | 19 | 0.34 |
| 1315911 | 87 | 62 | 46 | 28 | 0.75 |
| 1316106 | 72 | 53 | 36 | 22 | 0.35 |
| 1316346 | 140 | 59 | 38 | 21 | 0.85 |
| 1316392 | 63 | 42 | 18 | 7 | 0.14 |
| 1316414 | 68 | 39 | 17 | 6 | 0.16 |
| 1316704 | 79 | 60 | 37 | 19 | 0.46 |
| 1316835 | 85 | 59 | 44 | 29 | 0.68 |
| 1317084 | 66 | 52 | 37 | 22 | 0.29 |
| 1317090 | 48 | 32 | 24 | 12 | <0.06 |
| 1317136 | 76 | 39 | 20 | 8 | 0.21 |

TABLE 61
Dose-dependent reduction of human HTT RNA
in A431 cells by modified oligonucleotides

| | HTT RNA (% UTC) | | | | IC50 |
|---|---|---|---|---|---|
| Compound No. | 63 nM | 250 nM | 1000 nM | 4000 nM | (μM) |
| 388241 | 78 | 58 | 41 | 18 | 0.46 |
| 1314606 | 80 | 60 | 36 | 22 | 0.48 |
| 1314678 | 81 | 60 | 41 | 39 | 0.83 |
| 1314828 | 72 | 49 | 29 | 19 | 0.28 |
| 1314829 | 58 | 29 | 16 | 9 | 0.07 |
| 1314935 | 59 | 44 | 26 | 16 | 0.14 |
| 1315083 | 48 | 28 | 16 | 11 | <0.06 |
| 1315309 | 75 | 60 | 36 | 22 | 0.44 |
| 1315347 | 56 | 36 | 20 | 10 | 0.09 |
| 1315501 | 59 | 36 | 26 | 13 | 0.11 |
| 1315512 | 79 | 44 | 33 | 17 | 0.31 |
| 1315652 | 61 | 32 | 20 | 8 | 0.10 |
| 1315746 | 71 | 43 | 26 | 20 | 0.23 |
| 1315885 | 88 | 69 | 45 | 24 | 0.76 |
| 1316435 | 47 | 23 | 13 | 8 | <0.06 |
| 1316639 | 38 | 23 | 14 | 9 | <0.06 |
| 1316788 | 79 | 49 | 38 | 20 | 0.38 |
| 1316846 | 74 | 57 | 29 | 22 | 0.36 |
| 1317164 | 72 | 52 | 39 | 17 | 0.34 |

TABLE 62
Dose-dependent reduction of human HTT RNA
in A431 cells by modified oligonucleotides

| | HTT RNA (% UTC) | | | | IC50 |
|---|---|---|---|---|---|
| Compound No. | 63 nM | 250 nM | 1000 nM | 4000 nM | (μM) |
| 388241 | 91 | 64 | 31 | 20 | 0.54 |
| 1314511 | 86 | 41 | 23 | 17 | 0.30 |
| 1314540 | 75 | 42 | 27 | 13 | 0.24 |
| 1314603 | 73 | 47 | 33 | 23 | 0.33 |
| 1315317 | 48 | 26 | 14 | 7 | <0.06 |
| 1315408 | 62 | 41 | 26 | 14 | 0.14 |
| 1315499 | 95 | 77 | 69 | 52 | >4 |
| 1315536 | 73 | 43 | 26 | 14 | 0.23 |
| 1315537 | 85 | 52 | 28 | 16 | 0.38 |
| 1315584 | 75 | 60 | 35 | 18 | 0.40 |
| 1315794 | 75 | 37 | 23 | 13 | 0.20 |
| 1315950 | 55 | 32 | 14 | 6 | 0.07 |
| 1316400 | 66 | 39 | 21 | 12 | 0.15 |
| 1316621 | 69 | 39 | 26 | 8 | 0.19 |
| 1316672 | 77 | 51 | 28 | 12 | 0.30 |
| 1316766 | 65 | 34 | 24 | 17 | 0.13 |
| 1316908 | 70 | 46 | 24 | 19 | 0.22 |
| 1317017 | 63 | 33 | 17 | 9 | 0.11 |
| 1317031 | 63 | 30 | 20 | 10 | 0.10 |

TABLE 63
Dose-dependent reduction of human HTT RNA
in A431 cells by modified oligonucleotides

| | HTT RNA (% UTC) | | | | IC50 |
|---|---|---|---|---|---|
| Compound No. | 63 nM | 250 nM | 1000 nM | 4000 nM | (μM) |
| 388241 | 83 | 58 | 44 | 24 | 0.59 |
| 1314708 | 52 | 31 | 18 | 15 | <0.06 |
| 1314762 | 45 | 20 | 9 | 6 | <0.06 |
| 1314827 | 81 | 58 | 41 | 24 | 0.55 |
| 1314891 | 74 | 57 | 35 | 22 | 0.40 |
| 1314907 | 71 | 34 | 18 | 8 | 0.16 |
| 1314918 | 45 | 22 | 12 | 6 | <0.06 |
| 1314920 | 88 | 64 | 43 | 25 | 0.68 |
| 1314967 | 33 | 14 | 6 | 4 | <0.06 |
| 1315340 | 53 | 22 | 14 | 6 | <0.06 |
| 1315412 | 80 | 53 | 36 | 22 | 0.42 |
| 1315678 | 90 | 44 | 24 | 11 | 0.33 |
| 1315749 | 71 | 49 | 31 | 18 | 0.28 |
| 1316062 | 57 | 30 | 14 | 8 | 0.07 |
| 1316162 | 97 | 80 | 58 | 34 | 1.54 |
| 1316544 | 57 | 35 | 19 | 10 | 0.09 |
| 1316722 | 90 | 73 | 49 | 27 | 0.94 |
| 1316775 | 81 | 60 | 41 | 21 | 0.52 |
| 1317050 | 77 | 49 | 34 | 23 | 0.35 |

TABLE 64
Dose-dependent reduction of human HTT RNA
in A431 cells by modified oligonucleotides

| | HTT RNA (% UTC) | | | | IC50 |
|---|---|---|---|---|---|
| Compound No. | 63 nM | 250 nM | 1000 nM | 4000 nM | (μM) |
| 388241 | 83 | 61 | 38 | 23 | 0.56 |
| 1314845 | 61 | 44 | 25 | 13 | 0.15 |
| 1314916 | 90 | 81 | 31 | 16 | 0.63 |
| 1314928 | 85 | 68 | 53 | 34 | 1.11 |
| 1315077 | 68 | 44 | 18 | 20 | 0.18 |
| 1315147 | 74 | 45 | 31 | 15 | 0.26 |
| 1315341 | 54 | 27 | 16 | 9 | <0.06 |
| 1315425 | 64 | 42 | 28 | 17 | 0.16 |
| 1315498 | 81 | 53 | 38 | 23 | 0.46 |
| 1315722 | 86 | 58 | 39 | 22 | 0.54 |
| 1315812 | 70 | 52 | 32 | 23 | 0.30 |
| 1315879 | 81 | 61 | 47 | 26 | 0.66 |
| 1315897 | 98 | 66 | 40 | 23 | 0.73 |
| 1315974 | 65 | 44 | 33 | 27 | 0.20 |
| 1316232 | 83 | 52 | 35 | 21 | 0.42 |
| 1316421 | 85 | 66 | 49 | 27 | 0.81 |
| 1316508 | 99 | 64 | 41 | 26 | 0.76 |
| 1316762 | 73 | 60 | 37 | 27 | 0.46 |
| 1316926 | 55 | 31 | 21 | 22 | <0.06 |

TABLE 65
Dose-dependent reduction of human HTT RNA
in A431 cells by modified oligonucleotides

| | HTT RNA (% UTC) | | | | IC50 |
|---|---|---|---|---|---|
| Compound No. | 63 nM | 250 nM | 1000 nM | 4000 nM | (μM) |
| 388241 | 90 | 56 | 37 | 21 | 0.53 |
| 1315878 | 67 | 42 | 27 | 15 | 0.18 |
| 1316143 | 64 | 48 | 31 | 21 | 0.21 |
| 1316972 | 69 | 47 | 32 | 19 | 0.25 |
| 1317142 | 73 | 38 | 26 | 15 | 0.21 |
| 1318569 | 72 | 49 | 31 | 19 | 0.29 |
| 1318594 | 70 | 52 | 42 | 31 | 0.43 |
| 1318605 | 80 | 46 | 29 | 19 | 0.32 |
| 1318615 | 61 | 39 | 21 | 13 | 0.12 |
| 1318620 | 61 | 35 | 28 | 15 | 0.12 |
| 1318641 | 75 | 50 | 39 | 21 | 0.37 |
| 1318695 | 68 | 39 | 23 | 15 | 0.17 |
| 1318698 | 83 | 47 | 24 | 16 | 0.31 |
| 1318708 | 57 | 30 | 19 | 13 | 0.07 |
| 1318715 | 79 | 51 | 33 | 19 | 0.36 |
| 1318726 | 66 | 41 | 27 | 17 | 0.17 |
| 1318742 | 63 | 38 | 25 | 15 | 0.13 |
| 1318745 | 66 | 41 | 26 | 16 | 0.17 |
| 1318747 | 64 | 41 | 32 | 17 | 0.17 |

TABLE 66
Dose-dependent reduction of human HTT RNA
in A431 cells by modified oligonucleotides

| | HTT RNA (% UTC) | | | | IC50 |
|---|---|---|---|---|---|
| Compound No. | 63 nM | 250 nM | 1000 nM | 4000 nM | (μM) |
| 388241 | 66 | 58 | 43 | 32 | 0.50 |
| 1314755 | 95 | 61 | 39 | 27 | 0.70 |
| 1314833 | 56 | 53 | 47 | 22 | 0.25 |
| 1314867 | 71 | 50 | 25 | 17 | 0.25 |
| 1314905 | 38 | 22 | 15 | 6 | <0.06 |
| 1315119 | 73 | 51 | 24 | 20 | 0.27 |
| 1315141 | 74 | 46 | 28 | 22 | 0.28 |
| 1315214 | 48 | 22 | 16 | 9 | <0.06 |
| 1315282 | 125 | 120 | 112 | 76 | >4 |
| 1315343 | 66 | 37 | 25 | 9 | 0.15 |
| 1315405 | 56 | 44 | 22 | 17 | 0.11 |
| 1315604 | 65 | 42 | 38 | 27 | 0.22 |
| 1315813 | 77 | 67 | 38 | 13 | 0.46 |
| 1316229 | 100 | 72 | 49 | 29 | 1.03 |
| 1316506 | 68 | 35 | 20 | 10 | 0.15 |
| 1316802 | 70 | 40 | 24 | 13 | 0.18 |
| 1316984 | 74 | 63 | 59 | 33 | 1.08 |

### Example 6: Design of Modified Oligonucleotides Complementary to Human HTT Nucleic Acid

[0496] Modified oligonucleotides complementary to a human HTT nucleic acid were designed, as described in the tables below. “Start site” indicates the 5′-most nucleoside to which the modified oligonucleotide is complementary in the target nucleic acid sequence. “Stop site” indicates the 3′-most nucleoside to which the modified oligonucleotide is complementary in the target nucleic acid sequence. Each modified oligonucleotide listed in the tables below is 100% complementary to SEQ ID NO: 1 (described herein above), to SEQ ID NO: 2 (described herein above), or to both. ‘N/A’ indicates that the modified oligonucleotide is not 100% complementary to that particular target nucleic acid sequence.

[0497] The modified oligonucleotides in the table below are 17 nucleosides in length, wherein the sugar motif for the gapmers is (from 5′ to 3′): eeeeddddddddkkeee; wherein each “d” represents a 2′-β-D-deoxyribosyl sugar moiety, each “e” represents a 2′-MOE sugar moiety, and each “k” represents a cEt sugar moiety. The modified oligonucleotides have an internucleoside linkage motif of (from 5′ to 3′): soosssssssssooss; wherein each “s” represents a phosphorothioate internucleoside linkage, and each “o” represents a phosphodiester internucleoside linkage. Each cytosine residue is a 5-methylcytosine.

TABLE 67
Modified oligonucleotides with a mixed MOE/cEt sugar motif and mixed PO/PS
internucleoside linkages complementary to human HTT

| | | SEQ | SEQ | SEQ ID | SEQ ID | |
|---|---|---|---|---|---|---|
| | | ID No: | ID No: | No: 2 | No: 2 | |
| Compound | | 1 Start | 1 Stop | Start | Stop | SEQ |
| Number | Sequence (5′ to 3′) | Site | Site | Site | Site | ID NO. |
| 1419386 | ACAGCTTTTATTTCCAT | N/A | N/A | 126800 | 126816 | 3552 |
| 1419387 | ACTCATTTCCACCTTCA | 5430 | 5446 | 115308 | 115324 | 3553 |
| 1419388 | AGAGGTCATCTTCGGTC | N/A | N/A | 118733 | 118749 | 3554 |
| 1419389 | AGCTTTTATTTCCATAC | N/A | N/A | 126798 | 126814 | 3555 |
| 1419390 | ATCTTGTTTTACCACCC | N/A | N/A | 35334 | 35350 | 3556 |
| 1419391 | ATTACTTTTTACAATGG | N/A | N/A | 62838 | 62854 | 3557 |
| 1419392 | CACAGCTTTTATTTCCA | N/A | N/A | 126801 | 126817 | 3558 |
| 1419393 | CACTCATTTCCACCTTC | 5431 | 5447 | 115309 | 115325 | 3559 |
| 1419394 | CAGCTTTTATTTCCATA | N/A | N/A | 126799 | 126815 | 3560 |
| 1419395 | CATCTTGTTTTACCACC | N/A | N/A | 35335 | 35351 | 3561 |
| 1419396 | CATTACTTTTTACAATG | N/A | N/A | 62839 | 62855 | 3562 |
| 1419397 | CATTTCCACCTTCAGCT | 5427 | 5443 | 115305 | 115321 | 3563 |
| 1419398 | CTAGAGGTCATCTTCGG | N/A | N/A | 118735 | 118751 | 3564 |
| 1419399 | CTCATTTCCACCTTCAG | 5429 | 5445 | 115307 | 115323 | 3565 |
| 1419400 | CTTTGATTTTTACCAGT | N/A | N/A | 60027 | 60043 | 3566 |
| 1419401 | GAGGTCATCTTCGGTCA | N/A | N/A | 118732 | 118748 | 3567 |
| 1419402 | GCATCTTGTTTTACCAC | N/A | N/A | 35336 | 35352 | 3568 |
| 1419403 | GCATTACTTTTTACAAT | N/A | N/A | 62840 | 62856 | 3569 |
| 1419404 | GCTGCTCACTCATTTCC | 5437 | 5453 | 115315 | 115331 | 3570 |
| 1419405 | GCTTTGATTTTTACCAG | N/A | N/A | 60028 | 60044 | 3571 |
| 1419406 | GCTTTTATTTCCATACA | N/A | N/A | 126797 | 126813 | 3572 |
| 1419407 | GGTCACAGCTTTTATTT | N/A | N/A | 126804 | 126820 | 3573 |
| 1419408 | GGTTAGTTTTCCTTTTA | N/A | N/A | 117880 | 117896 | 3574 |
| 1419409 | GTCACAGCTTTTATTTC | N/A | N/A | 126803 | 126819 | 3575 |
| 1419410 | GTTAGTTTTCCTTTTAT | N/A | N/A | 117879 | 117895 | 3576 |
| 1419412 | TAGAGGTCATCTTCGGT | N/A | N/A | 118734 | 118750 | 3577 |
| 1419413 | TAGTTTTCCTTTTATAT | N/A | N/A | 117877 | 117893 | 3578 |
| 1419414 | TCACAGCTTTTATTTCC | N/A | N/A | 126802 | 126818 | 3579 |
| 1419415 | TCACTCATTTCCACCTT | 5432 | 5448 | 115310 | 115326 | 3580 |
| 1419416 | TCATTTCCACCTTCAGC | 5428 | 5444 | 115306 | 115322 | 3581 |
| 1419417 | TCTTGTTTTACCACCCA | N/A | N/A | 35333 | 35349 | 3582 |
| 1419418 | TGCTGCTCACTCATTTC | 5438 | 5454 | 115316 | 115332 | 3583 |
| 1419419 | TGGTCACAGCTTTTATT | N/A | N/A | 126805 | 126821 | 3584 |
| 1419420 | TGTTGCTGCTCACTCAT | 5441 | 5457 | 115319 | 115335 | 3585 |
| 1419421 | TTACTTTTTACAATGGA | N/A | N/A | 62837 | 62853 | 3586 |
| 1419422 | TTAGTTTTCCTTTTATA | N/A | N/A | 117878 | 117894 | 3587 |
| 1419423 | TTGATTTTTACCAGTTA | N/A | N/A | 60025 | 60041 | 3588 |
| 1419424 | TTGCTGCTCACTCATTT | 5439 | 5455 | 115317 | 115333 | 3589 |
| 1419425 | TTTGATTTTTACCAGTT | N/A | N/A | 60026 | 60042 | 3590 |

[0498] The modified oligonucleotide in the table below is a 5-10-5 MOE gapmer. The gapmer is 20 nucleosides in length, wherein the sugar motif for the gapmer is (from 5′ to 3′): eeeeeddddddddddeeeee; wherein each “d” represents a 2′-β-D-deoxyribosyl sugar moiety, and each “e” represents a 2′-MOE sugar moiety. The gapmer has an internucleoside linkage motif of (from 5′ to 3′): sooosssssssssssooos; wherein each “s” represents a phosphorothioate internucleoside linkage, and each “o” represents a phosphodiester internucleoside linkage. Each cytosine residue is a 5-methylcytosine.

TABLE 68
5-10-5 MOE gapmers with mixed PO/PS internucleoside linkages complementary to
human HTT

| | | SEQ | SEQ | SEQ ID | SEQ ID | |
|---|---|---|---|---|---|---|
| | | ID No: | ID No: | No: 2 | No: 2 | |
| Compound | | 1 Start | 1 Stop | Start | Stop | SEQ |
| Number | Sequence (5′ to 3′) | Site | Site | Site | Site | ID NO. |
| 444652 | TTTCTCTATTGCACATTCCA | 5809 | 5828 | 130392 | 130411 | 3591 |

[0499] The modified oligonucleotides in the table below are 5-10-5 MOE gapmers. The gapmers are 20 nucleosides in length, wherein the sugar motif for the gapmers is (from 5′ to 3′): eeeeeddddddddddeeeee; wherein each “d” represents a 2′-β-D-deoxyribosyl sugar moiety, and each “e” represents a 2′-MOE sugar moiety. The gapmers have an internucleoside linkage motif of (from 5′ to 3′): sooosssssssssssooss; wherein each “s” represents a phosphorothioate internucleoside linkage, and each “o” represents a phosphodiester internucleoside linkage. Each cytosine residue is a 5-methylcytosine.

TABLE 69
5-10-5 MOE gapmers with mixed PO/PS internucleoside linkages complementary to
human HTT

| | | SEQ | SEQ | SEQ ID | SEQ ID | |
|---|---|---|---|---|---|---|
| | | ID No: | ID No: | No: 2 | No: 2 | |
| Compound | | 1 Start | 1 Stop | Start | Stop | SEQ |
| Number | Sequence (5′ to 3′) | Site | Site | Site | Site | ID NO. |
| 1391291 | ACACAGCCTGCTAGAGGTCA | N/A | N/A | 118742 | 118761 | 3592 |
| 1391292 | CTGCTCACTCATTTCCACCT | 5433 | 5452 | 115311 | 115330 | 3593 |
| 1391293 | CTCACTCATTTCCACCTTCA | 5430 | 5449 | 115308 | 115327 | 3594 |
| 1391294 | ACAGCCTGCTAGAGGTCATC | N/A | N/A | 118740 | 118759 | 3595 |
| 1391295 | CTTTGATTTTTACCAGTTAA | N/A | N/A | 60024 | 60043 | 3596 |
| 1391296 | TCATTTCCACCTTCAGCTGT | 5425 | 5444 | 115303 | 115322 | 3597 |
| 1391297 | TTGGGGGTGGTCACAGCTTT | N/A | N/A | 126809 | 126828 | 3598 |
| 1391298 | TTTTGCTTTGATTTTTACCA | N/A | N/A | 60029 | 60048 | 3599 |
| 1391299 | CCACCTTCAGCTGTTTTGTA | 5419 | 5438 | 115297 | 115316 | 3600 |
| 1391301 | TGCTGCTCACTCATTTCCAC | 5435 | 5454 | 115313 | 115332 | 3601 |
| 1391302 | GTTTTTTGCTTTGATTTTTA | N/A | N/A | 60032 | 60051 | 3602 |
| 1391303 | TTTGCTTTGATTTTTACCAG | N/A | N/A | 60028 | 60047 | 3603 |
| 1391304 | TTCCACCTTCAGCTGTTTTG | 5421 | 5440 | 115299 | 115318 | 3604 |
| 1391305 | TTTTTGCTTTGATTTTTACC | N/A | N/A | 60030 | 60049 | 3605 |
| 1391306 | GCCTGCTAGAGGTCATCTTC | N/A | N/A | 118737 | 118756 | 3606 |
| 1391307 | TTGTAGGTTTTTTGCTTTGA | N/A | N/A | 60038 | 60057 | 3607 |
| 1391308 | TGGTCACAGCTTTTATTTCC | N/A | N/A | 126802 | 126821 | 3608 |
| 1391309 | TGTTTTACCACCCATGCTGG | N/A | N/A | 35327 | 35346 | 3609 |
| 1391310 | GTGCATTACTTTTTACAATG | N/A | N/A | 62839 | 62858 | 3610 |
| 1391311 | GGGGTGGTCACAGCTTTTAT | N/A | N/A | 126806 | 126825 | 3611 |
| 1391312 | TAGAGGTCATCTTCGGTCAT | N/A | N/A | 118731 | 118750 | 3612 |
| 1391313 | GTTGGGGGTGGTCACAGCTT | N/A | N/A | 126810 | 126829 | 3613 |
| 1391314 | TATGTTGCTGCTCACTCATT | 5440 | 5459 | 115318 | 115337 | 3614 |
| 1391315 | TGCTTTGATTTTTACCAGTT | N/A | N/A | 60026 | 60045 | 3615 |
| 1391316 | ATTTCCACCTTCAGCTGTTT | 5423 | 5442 | 115301 | 115320 | 3616 |
| 1391318 | GAGGTCATCTTCGGTCATGT | N/A | N/A | 118729 | 118748 | 3617 |
| 1391319 | TCTTGTTTTACCACCCATGC | N/A | N/A | 35330 | 35349 | 3618 |
| 1391320 | CACAGCTTTTATTTCCATAC | N/A | N/A | 126798 | 126817 | 3619 |
| 1391321 | TACTTTTTACAATGGACAGT | N/A | N/A | 62833 | 62852 | 3620 |
| 1391322 | AGGTCATCTTCGGTCATGTG | N/A | N/A | 118728 | 118747 | 3621 |
| 1391323 | ATTACTTTTTACAATGGACA | N/A | N/A | 62835 | 62854 | 3622 |
| 1391324 | TGCATTACTTTTTACAATGG | N/A | N/A | 62838 | 62857 | 3623 |
| 1391325 | GGCATCTTGTTTTACCACCC | N/A | N/A | 35334 | 35353 | 3624 |
| 1391326 | TTGCTTTGATTTTTACCAGT | N/A | N/A | 60027 | 60046 | 3625 |
| 1391327 | ATCTTGTTTTACCACCCATG | N/A | N/A | 35331 | 35350 | 3626 |
| 1391328 | TTACTTTTTACAATGGACAG | N/A | N/A | 62834 | 62853 | 3627 |
| 1391329 | TGGGGGTGGTCACAGCTTTT | N/A | N/A | 126808 | 126827 | 3628 |
| 1391330 | CTGCTAGAGGTCATCTTCGG | N/A | N/A | 118735 | 118754 | 3629 |
| 1391332 | GCTGCTCACTCATTTCCACC | 5434 | 5453 | 115312 | 115331 | 3630 |
| 1391333 | GTTGCTGCTCACTCATTTCC | 5437 | 5456 | 115315 | 115334 | 3631 |
| 1391334 | AGCCTGCTAGAGGTCATCTT | N/A | N/A | 118738 | 118757 | 3632 |
| 1391335 | TGGCATCTTGTTTTACCACC | N/A | N/A | 35335 | 35354 | 3633 |
| 1391336 | AAGTGCATTACTTTTTACAA | N/A | N/A | 62841 | 62860 | 3634 |
| 1391337 | GGTGGTCACAGCTTTTATTT | N/A | N/A | 126804 | 126823 | 3635 |
| 1391338 | ATGGCATCTTGTTTTACCAC | N/A | N/A | 35336 | 35355 | 3636 |
| 1391339 | CTCATTTCCACCTTCAGCTG | 5426 | 5445 | 115304 | 115323 | 3637 |
| 1391340 | TGTAGGTTTTTTGCTTTGAT | N/A | N/A | 60037 | 60056 | 3638 |
| 1391341 | GTTTTACCACCCATGCTGGA | N/A | N/A | 35326 | 35345 | 3639 |
| 1391342 | CCTGCTAGAGGTCATCTTCG | N/A | N/A | 118736 | 118755 | 3640 |
| 1391343 | TAGGTTTTTTGCTTTGATTT | N/A | N/A | 60035 | 60054 | 3641 |
| 1391344 | TTTTTTGCTTTGATTTTTAC | N/A | N/A | 60031 | 60050 | 3642 |
| 1391345 | CAGCCTGCTAGAGGTCATCT | N/A | N/A | 118739 | 118758 | 3643 |
| 1391346 | GGGGGTGGTCACAGCTTTTA | N/A | N/A | 126807 | 126826 | 3644 |
| 1391347 | GTAGGTTTTTTGCTTTGATT | N/A | N/A | 60036 | 60055 | 3645 |
| 1391348 | ACAGCTTTTATTTCCATACA | N/A | N/A | 126797 | 126816 | 3646 |
| 1391349 | CACAGCCTGCTAGAGGTCAT | N/A | N/A | 118741 | 118760 | 3647 |
| 1391351 | GCTCACTCATTTCCACCTTC | 5431 | 5450 | 115309 | 115328 | 3648 |
| 1391352 | GTGGTCACAGCTTTTATTTC | N/A | N/A | 126803 | 126822 | 3649 |
| 1391353 | TGTTGCTGCTCACTCATTTC | 5438 | 5457 | 115316 | 115335 | 3650 |
| 1391355 | TTGTTTTACCACCCATGCTG | N/A | N/A | 35328 | 35347 | 3651 |
| 1391356 | ATGTTGCTGCTCACTCATTT | 5439 | 5458 | 115317 | 115336 | 3652 |
| 1391357 | TTTCCACCTTCAGCTGTTTT | 5422 | 5441 | 115300 | 115319 | 3653 |
| 1391358 | AGAGGTCATCTTCGGTCATG | N/A | N/A | 118730 | 118749 | 3654 |
| 1391359 | GGTTTTTTGCTTTGATTTTT | N/A | N/A | 60033 | 60052 | 3655 |
| 1391360 | AGGTTTTTTGCTTTGATTTT | N/A | N/A | 60034 | 60053 | 3656 |
| 1391361 | GCTAGAGGTCATCTTCGGTC | N/A | N/A | 118733 | 118752 | 3657 |
| 1391362 | GGTCATCTTCGGTCATGTGA | N/A | N/A | 118727 | 118746 | 3658 |
| 1391363 | TGCTAGAGGTCATCTTCGGT | N/A | N/A | 118734 | 118753 | 3659 |
| 1391364 | TCACTCATTTCCACCTTCAG | 5429 | 5448 | 115307 | 115326 | 3660 |
| 1391365 | CATTTCCACCTTCAGCTGTT | 5424 | 5443 | 115302 | 115321 | 3661 |
| 1391366 | TCCACCTTCAGCTGTTTTGT | 5420 | 5439 | 115298 | 115317 | 3662 |
| 1391367 | GGGTGGTCACAGCTTTTATT | N/A | N/A | 126805 | 126824 | 3663 |
| 1391368 | AGTGCATTACTTTTTACAAT | N/A | N/A | 62840 | 62859 | 3664 |
| 1394315 | GTTAGTTTTCCTTTTATATT | N/A | N/A | 117876 | 117895 | 3665 |
| 1394316 | ACTTGGTTAGTTTTCCTTTT | N/A | N/A | 117881 | 117900 | 3666 |
| 1394317 | TCCTTTTATATTCATCAGAA | N/A | N/A | 117868 | 117887 | 3667 |
| 1394318 | TTCCTTTTATATTCATCAGA | N/A | N/A | 117869 | 117888 | 3668 |
| 1394320 | TTAGTTTTCCTTTTATATTC | N/A | N/A | 117875 | 117894 | 3669 |
| 1394321 | TAACTTGGTTAGTTTTCCTT | N/A | N/A | 117883 | 117902 | 3670 |
| 1394323 | AACTTGGTTAGTTTTCCTTT | N/A | N/A | 117882 | 117901 | 3671 |
| 1394325 | TTGGTTAGTTTTCCTTTTAT | N/A | N/A | 117879 | 117898 | 3672 |
| 1394326 | TAGTTTTCCTTTTATATTCA | N/A | N/A | 117874 | 117893 | 3673 |
| 1394331 | CTTGGTTAGTTTTCCTTTTA | N/A | N/A | 117880 | 117899 | 3674 |
| 1394335 | AGTTTTCCTTTTATATTCAT | N/A | N/A | 117873 | 117892 | 3675 |
| 1394336 | TTTCCTTTTATATTCATCAG | N/A | N/A | 117870 | 117889 | 3676 |
| 1456397 | ATATTTTCTCAACTTTAAAC | N/A | N/A | 119644 | 119663 | 3677 |
| 1456398 | CATATTTTCTCAACTTTAAA | N/A | N/A | 119645 | 119664 | 3678 |
| 1456399 | CCATATTTTCTCAACTTTAA | N/A | N/A | 119646 | 119665 | 3679 |
| 1456400 | AGCCATATTTTCTCAACTTT | N/A | N/A | 119648 | 119667 | 3680 |
| 1456401 | CAAGCCATATTTTCTCAACT | N/A | N/A | 119650 | 119669 | 3681 |
| 1456402 | ACAAGCCATATTTTCTCAAC | N/A | N/A | 119651 | 119670 | 3682 |

[0500] The modified oligonucleotides in the table below are 5-10-5 MOE gapmers. The gapmers are 20 nucleosides in length, wherein the sugar motif for the gapmers is (from 5′ to 3′): eeeeeddddddddddeeeee; wherein each “d” represents a 2′-β-D-deoxyribosyl sugar moiety, and each “e” represents a 2′-MOE sugar moiety. The gapmers have an internucleoside linkage motif of (from 5′ to 3′): sossssssssssssssoss; wherein each “s” represents a phosphorothioate internucleoside linkage, and each “o” represents a phosphodiester internucleoside linkage. Each cytosine residue is a 5-methylcytosine.

TABLE 70
5-10-5 MOE gapmers with mixed PO/PS internucleoside linkages complementary to
human HTT

| | | SEQ | SEQ | SEQ ID | SEQ ID | |
|---|---|---|---|---|---|---|
| | | ID No: | ID No: | No: 2 | No: 2 | |
| Compound | | 1 Start | 1 Stop | Start | Stop | SEQ |
| Number | Sequence (5′ to 3′) | Site | Site | Site | Site | ID NO. |
| 1394439 | GGTTAGTTTTCCTTTTATAT | N/A | N/A | 117877 | 117896 | 2770 |
| 1394440 | GCATTACTTTTTACAATGGA | N/A | N/A | 62837 | 62856 | 3029 |
| 1394441 | ACTCATTTCCACCTTCAGCT | 5427 | 5446 | 115305 | 115324 | 2471 |
| 1394442 | GCATCTTGTTTTACCACCCA | N/A | N/A | 35333 | 35352 | 1208 |
| 1394443 | GCTTTGATTTTTACCAGTTA | N/A | N/A | 60025 | 60044 | 1502 |
| 1394444 | GTCACAGCTTTTATTTCCAT | N/A | N/A | 126800 | 126819 | 1652 |
| 1394445 | CTAGAGGTCATCTTCGGTCA | N/A | N/A | 118732 | 118751 | 2412 |

[0501] The modified oligonucleotides in the table below are 5-10-5 MOE gapmers. The gapmers are 20 nucleosides in length, wherein the sugar motif for the gapmers is (from 5′ to 3′): eeeeeddddddddddeeeee; wherein each “d” represents a 2′-β-D-deoxyribosyl sugar moiety, and each “e” represents a 2′-MOE sugar moiety. The gapmers have an internucleoside linkage motif of (from 5′ to 3′): ssoosssssssssssooss; wherein each “s” represents a phosphorothioate internucleoside linkage, and each “o” represents a phosphodiester internucleoside linkage. Each cytosine residue is a 5-methylcytosine.

TABLE 71
5-10-5 MOE gapmers with mixed PO/PS internucleoside linkages complementary to
human HTT

| | | SEQ | SEQ | SEQ ID | SEQ ID | |
|---|---|---|---|---|---|---|
| | | ID No: | ID No: | No: 2 | No: 2 | |
| Compound | | 1 Start | 1 Stop | Start | Stop | SEQ |
| Number | Sequence (5′ to 3′) | Site | Site | Site | Site | ID NO. |
| 1394446 | CTAGAGGTCATCTTCGGTCA | N/A | N/A | 118732 | 118751 | 2412 |
| 1394447 | GGTTAGTTTTCCTTTTATAT | N/A | N/A | 117877 | 117896 | 2770 |
| 1394448 | GCTTTGATTTTTACCAGTTA | N/A | N/A | 60025 | 60044 | 1502 |
| 1394449 | ACTCATTTCCACCTTCAGCT | 5427 | 5446 | 115305 | 115324 | 2471 |
| 1394450 | GTCACAGCTTTTATTTCCAT | N/A | N/A | 126800 | 126819 | 1652 |
| 1394451 | GCATTACTTTTTACAATGGA | N/A | N/A | 62837 | 62856 | 3029 |
| 1394452 | GCATCTTGTTTTACCACCCA | N/A | N/A | 35333 | 35352 | 1208 |

[0502] The modified oligonucleotides in the table below are 5-8-5 MOE gapmers. The gapmers are 18 nucleosides in length, wherein the sugar motif for the gapmers is (from 5′ to 3′): eeeeeddddddddeeeee; wherein each “d” represents a 2′-β-D-deoxyribosyl sugar moiety, and each “e” represents a 2′-MOE sugar moiety. The gapmers have an internucleoside linkage motif of (from 5′ to 3′): sooosssssssssooss; wherein each “s” represents a phosphorothioate internucleoside linkage, and each “o” represents a phosphodiester internucleoside linkage. Each cytosine residue is a 5-methylcytosine.

TABLE 72
5-8-5 MOE gapmers with mixed PO/PS internucleoside linkages complementary to
human HTT

| | | SEQ | SEQ | SEQ ID | SEQ ID | |
|---|---|---|---|---|---|---|
| | | ID No: | ID No: | No: 2 | No: 2 | |
| Compound | | 1 Start | 1 Stop | Start | Stop | SEQ |
| Number | Sequence (5′ to 3′) | Site | Site | Site | Site | ID NO. |
| 1394418 | TCACAGCTTTTATTTCCA | N/A | N/A | 126801 | 126818 | 3683 |
| 1394419 | TCATTTCCACCTTCAGCT | 5427 | 5444 | 115305 | 115322 | 3684 |
| 1394420 | ATCTTGTTTTACCACCCA | N/A | N/A | 35333 | 35350 | 3685 |
| 1394421 | GGTTAGTTTTCCTTTTAT | N/A | N/A | 117879 | 117896 | 3686 |
| 1394422 | GCATTACTTTTTACAATG | N/A | N/A | 62839 | 62856 | 3687 |
| 1394423 | GTCACAGCTTTTATTTCC | N/A | N/A | 126802 | 126819 | 3688 |
| 1394424 | CTCATTTCCACCTTCAGC | 5428 | 5445 | 115306 | 115323 | 3689 |
| 1394425 | CACAGCTTTTATTTCCAT | N/A | N/A | 126800 | 126817 | 3690 |
| 1394427 | CATCTTGTTTTACCACCC | N/A | N/A | 35334 | 35351 | 3691 |
| 1394428 | ATTACTTTTTACAATGGA | N/A | N/A | 62837 | 62854 | 3692 |
| 1394429 | AGAGGTCATCTTCGGTCA | N/A | N/A | 118732 | 118749 | 3693 |
| 1394430 | TTAGTTTTCCTTTTATAT | N/A | N/A | 117877 | 117894 | 3694 |
| 1394431 | TAGAGGTCATCTTCGGTC | N/A | N/A | 118733 | 118750 | 3695 |
| 1394432 | TTTGATTTTTACCAGTTA | N/A | N/A | 60025 | 60042 | 3696 |
| 1394433 | CATTACTTTTTACAATGG | N/A | N/A | 62838 | 62855 | 3697 |
| 1394434 | GTTAGTTTTCCTTTTATA | N/A | N/A | 117878 | 117895 | 3698 |
| 1394437 | GCATCTTGTTTTACCACC | N/A | N/A | 35335 | 35352 | 3699 |
| 1419360 | GGTCACAGCTTTTATTTC | N/A | N/A | 126803 | 126820 | 3700 |
| 1419361 | ACAGCTTTTATTTCCATA | N/A | N/A | 126799 | 126816 | 3701 |
| 1419362 | CAGCTTTTATTTCCATAC | N/A | N/A | 126798 | 126815 | 3702 |
| 1419365 | TGGTCACAGCTTTTATTT | N/A | N/A | 126804 | 126821 | 3703 |
| 1419370 | AGCTTTTATTTCCATACA | N/A | N/A | 126797 | 126814 | 3704 |
| 1456411 | CCATATTTTCTCAACTTT | N/A | N/A | 119648 | 119665 | 3705 |
| 1456412 | GCCATATTTTCTCAACTT | N/A | N/A | 119649 | 119666 | 3706 |
| 1456413 | CATATTTTCTCAACTTTA | N/A | N/A | 119647 | 119664 | 3707 |

[0503] The modified oligonucleotides in the table below are 5-8-5 MOE gapmers. The gapmers are 18 nucleosides in length, wherein the sugar motif for the gapmers is (from 5′ to 3′): eeeeeddddddddeeeee; wherein each “d” represents a 2′-β-D-deoxyribosyl sugar moiety, and each “e” represents a 2′-MOE sugar moiety. The gapmers have an internucleoside linkage motif of (from 5′ to 3′): sossssssssssssoss; wherein each “s” represents a phosphorothioate internucleoside linkage, and each “o” represents a phosphodiester internucleoside linkage. Each cytosine residue is a 5-methylcytosine.

TABLE 73
5-8-5 MOE gapmers with mixed PO/PS internucleoside linkages complementary to
human HTT

| | | SEQ | SEQ | SEQ ID | SEQ ID | |
|---|---|---|---|---|---|---|
| | | ID No: | ID No: | No: 2 | No: 2 | |
| Compound | | 1 Start | 1 Stop | Start | Stop | SEQ |
| Number | Sequence (5′ to 3′) | Site | Site | Site | Site | ID NO. |
| 1419374 | GGTCACAGCTTTTATTTC | N/A | N/A | 126803 | 126820 | 3700 |
| 1419375 | ACAGCTTTTATTTCCATA | N/A | N/A | 126799 | 126816 | 3701 |
| 1419376 | CAGCTTTTATTTCCATAC | N/A | N/A | 126798 | 126815 | 3702 |
| 1419379 | TGGTCACAGCTTTTATTT | N/A | N/A | 126804 | 126821 | 3703 |
| 1419380 | CACAGCTTTTATTTCCAT | N/A | N/A | 126800 | 126817 | 3690 |
| 1419383 | GTCACAGCTTTTATTTCC | N/A | N/A | 126802 | 126819 | 3688 |
| 1419384 | AGCTTTTATTTCCATACA | N/A | N/A | 126797 | 126814 | 3704 |

[0504] The modified oligonucleotides in the table below are 6-10-4 MOE gapmers. The gapmers are 20 nucleosides in length, wherein the sugar motif for the gapmers is (from 5′ to 3′): eeeeeeddddddddddeeee; wherein each “d” represents a 2′-β-D-deoxyribosyl sugar moiety, and each “e” represents a 2′-MOE sugar moiety. The gapmers have an internucleoside linkage motif of (from 5′ to 3′): sooooossssssssssoss; wherein each “s” represents a phosphorothioate internucleoside linkage, and each “o” represents a phosphodiester internucleoside linkage. Each cytosine residue is a 5-methylcytosine.

TABLE 74
6-10-4 MOE gapmers with mixed PO/PS internucleoside linkages complementary to
human HTT

| | | SEQ | SEQ | SEQ ID | SEQ ID | |
|---|---|---|---|---|---|---|
| | | ID No: | ID No: | No: 2 | No: 2 | |
| Compound | | 1 Start | 1 Stop | Start | Stop | SEQ |
| Number | Sequence (5′ to 3′) | Site | Site | Site | Site | ID NO. |
| 1394343 | ACTCATTTCCACCTTCAGCT | 5427 | 5446 | 115305 | 115324 | 2471 |
| 1394344 | GCATCTTGTTTTACCACCCA | N/A | N/A | 35333 | 35352 | 1208 |
| 1394345 | GTCACAGCTTTTATTTCCAT | N/A | N/A | 126800 | 126819 | 1652 |
| 1394346 | GCATTACTTTTTACAATGGA | N/A | N/A | 62837 | 62856 | 3029 |
| 1394347 | GCTTTGATTTTTACCAGTTA | N/A | N/A | 60025 | 60044 | 1502 |
| 1394348 | CTAGAGGTCATCTTCGGTCA | N/A | N/A | 118732 | 118751 | 2412 |
| 1394349 | GGTTAGTTTTCCTTTTATAT | N/A | N/A | 117877 | 117896 | 2770 |
| 1394357 | GGCATCTTGTTTTACCACCC | N/A | N/A | 35334 | 35353 | 3624 |
| 1394358 | TCTTGTTTTACCACCCATGC | N/A | N/A | 35330 | 35349 | 3618 |
| 1394359 | TGGCATCTTGTTTTACCACC | N/A | N/A | 35335 | 35354 | 3633 |
| 1394360 | ATCTTGTTTTACCACCCATG | N/A | N/A | 35331 | 35350 | 3626 |
| 1394361 | ATGGCATCTTGTTTTACCAC | N/A | N/A | 35336 | 35355 | 3636 |
| 1394367 | GGGTGGTCACAGCTTTTATT | N/A | N/A | 126805 | 126824 | 3663 |
| 1394368 | GGTGGTCACAGCTTTTATTT | N/A | N/A | 126804 | 126823 | 3635 |
| 1394369 | TTTGCTTTGATTTTTACCAG | N/A | N/A | 60028 | 60047 | 3603 |
| 1394370 | TAGAGGTCATCTTCGGTCAT | N/A | N/A | 118731 | 118750 | 3612 |
| 1394371 | CACAGCTTTTATTTCCATAC | N/A | N/A | 126798 | 126817 | 3619 |
| 1394372 | CTGCTAGAGGTCATCTTCGG | N/A | N/A | 118735 | 118754 | 3629 |
| 1394373 | GCTCACTCATTTCCACCTTC | 5431 | 5450 | 115309 | 115328 | 3648 |
| 1394374 | GAGGTCATCTTCGGTCATGT | N/A | N/A | 118729 | 118748 | 3617 |
| 1394375 | TGCATTACTTTTTACAATGG | N/A | N/A | 62838 | 62857 | 3623 |
| 1394376 | GCTAGAGGTCATCTTCGGTC | N/A | N/A | 118733 | 118752 | 3657 |
| 1394377 | CTCATTTCCACCTTCAGCTG | 5426 | 5445 | 115304 | 115323 | 3637 |
| 1394378 | ACAGCTTTTATTTCCATACA | N/A | N/A | 126797 | 126816 | 3646 |
| 1394379 | TGGTCACAGCTTTTATTTCC | N/A | N/A | 126802 | 126821 | 3608 |
| 1394380 | TGCTAGAGGTCATCTTCGGT | N/A | N/A | 118734 | 118753 | 3659 |
| 1394381 | AGTGCATTACTTTTTACAAT | N/A | N/A | 62840 | 62859 | 3664 |
| 1394382 | CTCACTCATTTCCACCTTCA | 5430 | 5449 | 115308 | 115327 | 3594 |
| 1394383 | AGAGGTCATCTTCGGTCATG | N/A | N/A | 118730 | 118749 | 3654 |
| 1394384 | ATTACTTTTTACAATGGACA | N/A | N/A | 62835 | 62854 | 3622 |
| 1394385 | TACTTTTTACAATGGACAGT | N/A | N/A | 62833 | 62852 | 3620 |
| 1394386 | TCATTTCCACCTTCAGCTGT | 5425 | 5444 | 115303 | 115322 | 3597 |
| 1394387 | GTGGTCACAGCTTTTATTTC | N/A | N/A | 126803 | 126822 | 3649 |
| 1394388 | TTTTTGCTTTGATTTTTACC | N/A | N/A | 60030 | 60049 | 3605 |
| 1394389 | TTTTGCTTTGATTTTTACCA | N/A | N/A | 60029 | 60048 | 3599 |
| 1394390 | TGCTTTGATTTTTACCAGTT | N/A | N/A | 60026 | 60045 | 3615 |
| 1394391 | CTTTGATTTTTACCAGTTAA | N/A | N/A | 60024 | 60043 | 3596 |
| 1394392 | TCACTCATTTCCACCTTCAG | 5429 | 5448 | 115307 | 115326 | 3660 |
| 1394393 | GTGCATTACTTTTTACAATG | N/A | N/A | 62839 | 62858 | 3610 |
| 1394394 | CATTTCCACCTTCAGCTGTT | 5424 | 5443 | 115302 | 115321 | 3661 |
| 1394395 | TTACTTTTTACAATGGACAG | N/A | N/A | 62834 | 62853 | 3627 |
| 1394396 | TTGCTTTGATTTTTACCAGT | N/A | N/A | 60027 | 60046 | 3625 |
| 1394397 | ACTTGGTTAGTTTTCCTTTT | N/A | N/A | 117881 | 117900 | 3666 |
| 1394398 | GTTAGTTTTCCTTTTATATT | N/A | N/A | 117876 | 117895 | 3665 |
| 1394399 | TAGTTTTCCTTTTATATTCA | N/A | N/A | 117874 | 117893 | 3673 |
| 1394400 | TTAGTTTTCCTTTTATATTC | N/A | N/A | 117875 | 117894 | 3669 |
| 1394401 | CTTGGTTAGTTTTCCTTTTA | N/A | N/A | 117880 | 117899 | 3674 |
| 1394402 | TTGGTTAGTTTTCCTTTTAT | N/A | N/A | 117879 | 117898 | 3672 |
| 1456403 | ATATTTTCTCAACTTTAAAC | N/A | N/A | 119644 | 119663 | 3677 |
| 1456404 | CATATTTTCTCAACTTTAAA | N/A | N/A | 119645 | 119664 | 3678 |
| 1456405 | CCATATTTTCTCAACTTTAA | N/A | N/A | 119646 | 119665 | 3679 |
| 1456406 | GCCATATTTTCTCAACTTTA | N/A | N/A | 119647 | 119666 | 940 |
| 1456407 | AGCCATATTTTCTCAACTTT | N/A | N/A | 119648 | 119667 | 3680 |
| 1456408 | AAGCCATATTTTCTCAACTT | N/A | N/A | 119649 | 119668 | 919 |
| 1456409 | CAAGCCATATTTTCTCAACT | N/A | N/A | 119650 | 119669 | 3681 |
| 1456410 | ACAAGCCATATTTTCTCAAC | N/A | N/A | 119651 | 119670 | 3682 |

### Example 7: Tolerability of Modified Oligonucleotides Complementary to Human HTT in Wild-Type Mice, 3 Hour Study

[0505] Modified oligonucleotides described above were tested in wild-type female C57/Bl6 mice to assess the tolerability of the oligonucleotides. Wild-type female C57/Bl6 mice each received a single ICV dose of modified oligonucleotide at 700 μg. Each treatment group consisted of 4 mice. A group of 4 mice received PBS as a negative control for each experiment. Each experiment is identified in separate tables below. At 3 hours post-injection, mice were evaluated according to seven different criteria. The criteria are (1) the mouse was bright, alert, and responsive; (2) the mouse was standing or hunched without stimuli; (3) the mouse showed any movement without stimuli; (4) the mouse demonstrated forward movement after it was lifted; (5) the mouse demonstrated any movement after it was lifted; (6) the mouse responded to tail pinching; (7) regular breathing. For each of the 7 criteria, a mouse was given a sub-score of 0 if it met the criteria and 1 if it did not (the functional observational battery score or FOB). After all 7 criteria were evaluated, the scores were summed for each mouse and averaged within each treatment group. The results are presented in the tables below.

TABLE 75
Tolerability scores in mice (n = 4) at 700 μg dose

| Compound No. | 3 hr. FOB |
|---|---|
| PBS | 0.00 |
| 1314967 | 1.00 |
| 1314979 | 2.00 |
| 1315343 | 1.00 |
| 1315578 | 1.00 |
| 1316218 | 1.50 |
| 1316639 | 1.00 |
| 1317084 | 0.00 |

TABLE 76
Tolerability scores in mice (n = 4) at 700 μg dose

| Compound No. | 3 hr. FOB |
|---|---|
| PBS | 0.00 |
| 1314723 | 0.00 |
| 1315073 | 0.00 |
| 1315119 | 4.50 |
| 1315147 | 6.75 |
| 1315214 | 0.00 |
| 1315813 | 0.00 |
| 1391301 | 0.00 |
| 1391310 | 1.25 |
| 1391320 | 0.00 |
| 1394347 | 0.50 |
| 1394371 | 0.00 |
| 1394375 | 6.50 |
| 1394378 | 0.00 |
| 1394401 | 4.25 |
| 1394402 | 0.00 |
| 1394418 | 0.00 |
| 1394421 | 1.00 |
| 1394440 | 5.25 |
| 1394444 | 1.25 |
| 1419386 | 0.00 |

TABLE 77
Tolerability scores in mice (n = 4) at 700 μg dose

| Compound No. | 3 hr. FOB |
|---|---|
| PBS | 0.00 |
| 1314833 | 3.00 |
| 1391348 | 1.00 |
| 1394393 | 3.00 |

### Example 8: Tolerability of Modified Oligonucleotides Complementary to Human HTT in Rats, 3-Hour Study

[0506] Modified oligonucleotides described above were tested in rats to assess the tolerability of the oligonucleotides. Sprague Dawley rats each received a single intrathecal (IT) dose of 3 mg of modified oligonucleotide listed in the tables below. Each treatment group consisted of 3-4 rats. A group of 3-4 rats received PBS as a negative control. Each experiment is identified in separate tables below. At 3 hours post-injection, movement in 7 different parts of the body were evaluated for each rat. The 7 body parts are (1) the rat's tail; (2) the rat's posterior posture; (3) the rat's hind limbs; (4) the rat's hind paws; (5) the rat's forepaws; (6) the rat's anterior posture; (7) the rat's head. For each of the 7 different body parts, each rat was given a sub-score of 0 if the body part was moving or 1 if the body part was paralyzed (the functional observational battery score or FOB). After each of the 7 body parts were evaluated, the sub-scores were summed for each rat and then averaged for each group. For example, if a rat's tail, head, and all other evaluated body parts were moving 3 hours after the 3 mg IT dose, it would get a summed score of 0. If another rat was not moving its tail 3 hours after the 3 mg IT dose but all other evaluated body parts were moving, it would receive a score of 1. Results are presented as the average score for each treatment group.

TABLE 78
Tolerability scores in rats (n = 4) at 3 mg dose

| Compound No. | 3 hr. FOB |
|---|---|
| PBS | 0.25 |
| 388241 | 2.75 |
| 1315343 | 0.50 |
| 1315578 | 0.50 |
| 1316218 | 1.50 |
| 1316639 | 2.25 |
| 1317084 | 0.25 |

TABLE 79
Tolerability scores in rats (n = 4) at 3 mg dose

| Compound No. | 3 hr. FOB |
|---|---|
| PBS | 0.00 |
| 1314979 | 2.50 |
| 1391333 | 2.00 |
| 1391353 | 4.00 |
| 1394371 | 0.00 |
| 1394378 | 0.00 |
| 1394379 | 2.00 |
| 1394392 | 2.00 |

TABLE 80
Tolerability scores in rats (n = 4) at 3 mg dose

| Compound No. | 3 hr. FOB |
|---|---|
| PBS | 0.25 |
| 1314967 | 2.25 |
| 1315073 | 1.00 |
| 1315214 | 3.00‡ |
| 1315813 | 1.50‡ |
| 1316392 | 0.50 |
| 1318641 | 3.00 |
| 1391293 | 0.25 |
| 1391320 | 0.00 |
| 1394375 | 3.25 |
| 1394401 | 2.50 |
| 1394402 | 1.75 |
| 1394439 | 4.00 |
| 1394440 | 3.50 |

‡indicates that fewer than 4 samples were available

TABLE 81
Tolerability scores in rats (n = 3) at 3 mg dose

| Compound No. | 3 hr. FOB |
|---|---|
| PBS | 0.00 |
| 1314833 | 0.33 |
| 1316061 | 0.67 |
| 1316846 | 0.33 |
| 1391301 | 2.33 |
| 1391310 | 0.67 |
| 1391348 | 0.00 |
| 1391351 | 3.00 |
| 1391364 | 2.00 |
| 1394336 | 0.33 |
| 1394346 | 1.33 |
| 1394347 | 3.00‡ |
| 1394348 | 2.67 |
| 1394393 | 2.67 |
| 1394443 | 2.67 |
| 1394444 | 5.00 |
| 1394445 | 3.00 |
| 1394446 | 1.67 |
| 1394450 | 1.33 |

‡indicates that fewer than 3 samples were available

TABLE 82
Tolerability scores in rats (n = 3) at 3 mg dose

| Compound No. | 3 hr. FOB |
|---|---|
| PBS | 0.00 |
| 1314723 | 0.00 |
| 1315077 | 1.33 |
| 1315119 | 1.00 |
| 1315147 | 0.00 |
| 1315321 | 2.00 |
| 1315833 | 3.00‡ |
| 1315921 | 3.33 |
| 1318605 | 4.00 |
| 1391314 | 4.00 |
| 1391356 | 4.00 |
| 1394418 | 0.00 |
| 1394421 | 1.67 |
| 1394441 | 0.00 |
| 1419386 | 0.00 |
| 1419392 | 0.33 |

‡indicates that fewer than 3 samples were available

TABLE 83
Tolerability scores in rats (n = 3) at 3 mg dose

| Compound No. | 3 hr. FOB |
|---|---|
| PBS | 0.00 |
| 1419387 | 0.00 |
| 1419404 | 0.00 |
| 1419415 | 0.33 |
| 1419420 | 2.67 |

TABLE 84
Tolerability scores in rats (n = 3) at 3 mg dose

| Compound No. | 3 hr. FOB |
|---|---|
| PBS | 0.00 |
| 1316689 | 1.00 |
| 1456397 | 0.33 |
| 1456398 | 0.00 |
| 1456399 | 0.33 |
| 1456400 | 1.00 |
| 1456401 | 0.00 |
| 1456402 | 0.00 |
| 1456403 | 0.00 |
| 1456404 | 0.00 |
| 1456405 | 0.00 |
| 1456406 | 0.67 |
| 1456407 | 1.00 |
| 1456408 | 1.00 |
| 1456409 | 0.00 |
| 1456410 | 0.00 |
| 1456411 | 1.33 |
| 1456412 | 2.00 |
| 1456413 | 3.33 |

### Example 9: Activity of Modified Oligonucleotides Complementary to Human HTT in Transgenic Mice

[0507] Transgenic mice expressing human HTT (The Jackson Laboratory, Stock No: 008197) were used to test activity of modified oligonucleotides described above.

### Treatment

[0508] Transgenic mice were divided into groups of 3-4 mice each. Each mouse received a single ICV bolus of 200-300 μg of modified oligonucleotide as indicated in the tables below. A group of 3-4 mice received PBS as a negative control.

### RNA Analysis

[0509] Two weeks post treatment, mice were sacrificed, and RNA was extracted from cortical brain tissue and spinal cord for RTPCR analysis to measure amount of HTT RNA using human primer probe set RTS2617 (described herein above). Results are presented as percent human HTT relative to PBS control, normalized to mouse cyclophilin A. Mouse cyclophilin A RNA was amplified using mouse prime probe set m_cyclo24 (forward sequence TCGCCGCTTGCTGCA, designated herein as SEQ ID NO: 20; reverse sequence ATCGGCCGTGATGTCGA, designated herein as SEQ ID NO: 21; probe sequence CCATGGTCAACCCCACCGTGTTC, designated herein as SEQ ID NO: 22).

[0510] Each experiment is identified in separate tables below. N.D. in the tables below refers to instances where the value was Not Defined.

TABLE 85
Reduction of human HTT RNA in transgenic mice (n = 4)
treated with 200 μg of modified oligonucleotide

HTT RNA (% control)

| Compound ID | Spinal Cord | Cortex |
|---|---|---|
| PBS | 100 | 100 |
| 1314810 | 47 | 52 |
| 1314849 | 54 | 52 |
| 1314935 | 24 | 43 |
| 1314999 | 32 | 44 |
| 1315234 | 64 | 72 |
| 1315340 | 57 | 57 |
| 1315621 | 44 | 46 |
| 1315781 | 61 | 75 |
| 1316535 | 69 | 34 |
| 1316768 | 50 | 36 |
| 1316788 | 60 | 31 |
| 1317090 | 20 | 25 |
| 1317204 | 49‡ | 73‡ |
| 1317227 | 41 | 42 |

‡indicates that fewer than 4 samples were available

TABLE 86
Reduction of human HTT RNA in transgenic mice (n = 4)
treated with 200 μg of modified oligonucleotide

HTT RNA (% control)

| Compound ID | Spinal Cord | Cortex |
|---|---|---|
| PBS | 100 | 100 |
| 1314540 | 62 | 44 |
| 1314541 | 51 | 22 |
| 1314544 | 73 | 40 |
| 1314606 | 78 | 34 |
| 1314708 | 74 | 40 |
| 1314723 | 35 | 19 |
| 1314891 | 74 | 31 |
| 1314967 | 35 | 5 |
| 1314979 | 46‡ | 8‡ |
| 1315041 | 54 | 25 |
| 1315089 | 49 | 20 |
| 1315143 | 49 | 42 |
| 1315321 | 53 | 18 |
| 1315343 | 32 | 9 |
| 1315405 | 75 | 35 |
| 1315578 | 46 | 10 |
| 1315652 | 67 | 28 |
| 1315698 | 47‡ | 44‡ |
| 1315702 | 48‡ | 21‡ |
| 1315797 | 65 | 29 |
| 1315877 | 42 | 25 |
| 1316169 | 44 | 25 |
| 1316218 | 27 | 9 |
| 1316235 | 64 | 34 |
| 1316392 | 34 | 14 |
| 1316435 | 83 | 33 |
| 1316762 | 81 | 50 |
| 1316766 | 91 | 57 |
| 1316803 | 53 | 22 |
| 1316846 | 39 | 16 |
| 1317084 | 29 | 11 |
| 1317136 | 48 | 29 |
| 1317229 | 32 | 20 |

‡indicates that fewer than 4 samples were available

TABLE 87
Reduction of human HTT RNA in transgenic mice (n = 4)
treated with 200 μg of modified oligonucleotide

HTT RNA (% control)

| Compound ID | Spinal Cord | Cortex |
|---|---|---|
| PBS | 100 | 100 |
| 1314685 | 60 | 23 |
| 1314789 | 59 | 39 |
| 1314813 | 125 | 74 |
| 1314824 | 87 | 51 |
| 1314845 | 51 | 28 |
| 1314848 | 57 | 25 |
| 1314916 | 75 | 37 |
| 1314943 | 64 | 52 |
| 1315119 | 39 | 19 |
| 1315294 | 92‡ | 68‡ |
| 1315309 | 36 | 31 |
| 1315408 | 72 | 45 |
| 1315584 | 84 | 45 |
| 1315672 | 54 | 21 |
| 1315722 | 60 | 45 |
| 1315974 | 78 | 45 |
| 1316062 | 54 | 43 |
| 1316154 | 59 | 74 |
| 1316185 | 134 | 94 |
| 1316254 | 97 | 42 |
| 1316310 | 66‡ | 20‡ |
| 1316324 | 68 | 54 |
| 1316414 | 57 | 28 |
| 1316604 | 96 | 69 |
| 1316614 | 63 | 34 |
| 1316716 | 74 | 65 |
| 1316775 | 48 | 45 |
| 1316858 | 61 | 88 |
| 1316936 | 39 | 54 |
| 1317017 | 28 | 33 |
| 1317031 | 36 | 27 |
| 1317128 | 63 | 58 |
| 1317205 | 57 | 39 |
| 1318725 | 99 | 86 |

‡indicates that fewer than 4 samples were available

TABLE 88
Reduction of human HTT RNA in transgenic mice (n = 4)
treated with 200 μg of modified oligonucleotide

HTT RNA (% control)

| Compound ID | Spinal Cord | Cortex |
|---|---|---|
| PBS | 100 | 100 |
| 388241 | 44 | 20 |
| 1314635 | 56 | 68 |
| 1314647 | 66 | 68 |
| 1314833 | 29 | 16 |
| 1315027 | 41 | 48 |
| 1315039 | 35 | 47 |
| 1315214 | 26 | 12 |
| 1315501 | 68 | 61 |
| 1315813 | 29 | 14 |
| 1315833 | 51 | 19 |
| 1316545 | 56 | 30 |
| 1316620 | 48 | 35 |
| 1316722 | 45 | 29 |
| 1317164 | 41 | 20 |
| 1318569 | 38 | 28 |
| 1318621 | 54 | 42 |
| 1318675 | 42 | 27 |

TABLE 89
Reduction of human HTT RNA in transgenic mice (n = 4)
treated with 200 μg of modified oligonucleotide

HTT RNA (% control)

| Compound ID | Spinal Cord | Cortex |
|---|---|---|
| PBS | 100 | 100 |
| 1314696 | 22 | 44 |
| 1314904 | 30 | 38 |
| 1315141 | 59 | 84 |
| 1315878 | 67 | 36 |
| 1315964 | 53 | 65 |
| 1316117 | 43 | 61 |
| 1316143 | 78 | 53 |
| 1316449 | 31 | 35 |
| 1316972 | 34 | 21 |
| 1318566 | 92 | 46 |
| 1318573 | 42 | 31 |
| 1318690 | 50 | 30 |
| 1318691 | 86 | 87 |
| 1318695 | 41 | 44 |
| 1318745 | 53 | 45 |
| 1318747 | 40 | 28 |

TABLE 90
Reduction of human HTT RNA in transgenic mice (n = 4)
treated with 200 μg of modified oligonucleotide

HTT RNA (% control)

| Compound ID | Spinal Cord | Cortex |
|---|---|---|
| PBS | 100 | 100 |
| 1314526 | 121 | 159 |
| 1314549 | 74 | 56 |
| 1314870 | 107 | 107 |
| 1314905 | 54 | 100 |
| 1314966 | 59 | 79 |
| 1315056 | 46 | 51 |
| 1315074 | 28 | 43 |
| 1315083 | 60 | 35 |
| 1315137 | 68 | 122 |
| 1315341 | 20 | 39 |
| 1315425 | 83 | 165 |
| 1315817 | 49 | 63 |
| 1315867 | 32 | 49 |
| 1316312 | 33 | 46 |
| 1316563 | 42 | 41 |
| 1316621 | 33 | 40 |
| 1316802 | 30 | 23 |

TABLE 91
Reduction of human HTT RNA in transgenic mice (n = 4)
treated with 200 μg of modified oligonucleotide

HTT RNA (% control)

| Compound ID | Spinal Cord | Cortex |
|---|---|---|
| PBS | 100 | 100 |
| 388241 | 56 | 44 |
| 1314603 | 52 | 31 |
| 1314762 | 53 | 42 |
| 1314829 | 20 | 20 |
| 1314918 | 27 | 31 |
| 1314955 | 52 | 54 |
| 1315077 | 20 | 19 |
| 1315347 | 27 | 22 |
| 1315544 | 115 | 77 |
| 1315692 | 78 | 50 |
| 1315747 | 66 | 44 |
| 1315883 | 47 | 50 |
| 1315921 | 27 | 19 |
| 1315950 | 47 | 35 |
| 1316506 | 63 | 50 |
| 1316544 | 32 | 41 |
| 1316551 | 35 | 21 |
| 1316552 | 80 | 58 |
| 1316639 | 14 | 10 |
| 1316725 | 34 | 25 |
| 1317175 | 63 | N.D. |
| 1318657 | 88 | N.D. |
| 1318685 | 52 | N.D. |

TABLE 92
Reduction of human HTT RNA in transgenic mice (n = 4)
treated with 200 μg of modified oligonucleotide

HTT RNA (% control)

| Compound ID | Spinal Cord | Cortex |
|---|---|---|
| PBS | 100 | 100 |
| 1314511 | 70 | 65 |
| 1315178 | 53 | 27 |
| 1315556 | 57 | 41 |
| 1316023 | 59 | 32 |
| 1316926 | 50 | 38 |
| 1317142 | 51 | 21 |
| 1318592 | 86 | 56 |
| 1318594 | 104 | 61 |
| 1318605 | 41 | 19 |
| 1318620 | 57 | 27 |
| 1318629 | 62 | 52 |
| 1318632 | 44 | 30 |
| 1318641 | 33 | 14 |
| 1318701 | 67 | 25 |
| 1318741 | 93 | 49 |

TABLE 93
Reduction of human HTT RNA in transgenic mice (n = 4)
treated with 200 μg of modified oligonucleotide

HTT RNA (% control)

| Compound ID | Spinal Cord | Cortex |
|---|---|---|
| PBS | 100 | 100 |
| 1318708 | 24 | 66 |
| 1314771 | 49 | 49 |
| 1314828 | 67 | 47 |
| 1314920 | 34 | 27 |
| 1315482 | 45 | 38 |
| 1316232 | 48 | 49 |
| 1316400 | 26 | 28 |
| 1317236 | 34 | 35 |
| 1318652 | 64 | 47 |
| 1314487 | 50 | 61 |
| 1314650 | 51 | 37 |
| 1314678 | 47 | 24 |
| 1314815 | 53 | 49 |
| 1314996 | 48 | 48 |
| 1315014 | 29 | 32 |
| 1315123 | 35 | 27 |
| 1315147 | 28 | 18 |

TABLE 94
Reduction of human HTT RNA in transgenic mice (n = 4)
treated with 200 μg of modified oligonucleotide

HTT RNA (% control)

| Compound ID | Spinal Cord | Cortex |
|---|---|---|
| PBS | 100 | 100 |
| 388241 | 73 | 56 |
| 1315373 | 81 | 105 |
| 1315537 | 45 | 53 |
| 1315723 | 41 | 87 |
| 1315749 | 25 | 49 |
| 1315800 | 78 | 65 |
| 1315808 | 48 | 75 |
| 1315865 | 42 | 69 |
| 1315911 | 46 | 64 |
| 1316051 | 56 | 71 |
| 1316096 | 51 | 92 |
| 1316679 | 43 | 74 |
| 1316745 | 44 | 44 |
| 1317163 | 40‡ | 102 |
| 1318586 | 39 | 42 |
| 1318623 | 86 | 63 |
| 1318715 | 90 | 77 |
| 1318742 | 83 | 67 |

‡indicates that fewer than 4 samples were available

TABLE 95
Reduction of human HTT RNA in transgenic mice (n = 4)
treated with 200 μg of modified oligonucleotide

HTT RNA (% control)

| Compound ID | Spinal Cord | Cortex |
|---|---|---|
| PBS | 100 | 100 |
| 1314592 | 29 | 40 |
| 1316811 | 40 | 61 |
| 1391295 | 45 | 62 |
| 1391298 | 51 | 37 |
| 1391303 | 46 | 50 |
| 1391305 | 47 | 46 |
| 1391309 | 70 | 92 |
| 1391315 | 44 | 43 |
| 1391319 | 37 | 44 |
| 1391325 | 28 | 33 |
| 1391326 | 54 | 59 |
| 1391327 | 37 | 36 |
| 1391335 | 32 | 29 |
| 1391338 | 45 | 55 |
| 1391341 | 61 | 119 |
| 1391355 | 74 | 70 |
| 1394344 | 21 | 21 |
| 1394347 | 17 | 17 |
| 1394357 | 29 | 23 |
| 1394358 | 50 | 53 |
| 1394359 | 18 | 30 |
| 1394360 | 40 | 38 |
| 1394361 | 29 | 38 |
| 1394369 | 32 | 43 |
| 1394388 | 40 | 31 |

TABLE 96
Reduction of human HTT RNA in transgenic mice (n = 4)
treated with 200 μg of modified oligonucleotide

HTT RNA (% control)

| Compound ID | Spinal Cord | Cortex |
|---|---|---|
| PBS | 100 | 100 |
| 1314907 | 31 | 27 |
| 1391293 | 36 | 14 |
| 1391296 | 51 | 31 |
| 1391299 | 42 | 45 |
| 1391304 | 47 | 49 |
| 1391310 | 26 | 17 |
| 1391316 | 56 | 35 |
| 1391321 | 52 | 51 |
| 1391323 | 64 | 43 |
| 1391324 | 39 | 37 |
| 1391336 | 52 | 54 |
| 1391339 | 48 | 23 |
| 1391351 | 18 | 17 |
| 1391357 | 72 | 50 |
| 1391364 | 32 | 15 |
| 1391365 | 57 | 24 |
| 1391366 | 95 | 31 |
| 1391368 | 50 | 27 |
| 1394346 | 16 | 10 |
| 1394375 | 35 | 11 |
| 1394381 | 39 | 133 |
| 1394384 | 74 | 47 |
| 1394385 | 54 | 96 |

TABLE 97
Reduction of human HTT RNA in transgenic mice (n = 4)
treated with 200 μg of modified oligonucleotide

HTT RNA (% control)

| Compound ID | Spinal Cord | Cortex |
|---|---|---|
| PBS | 100 | 100 |
| 1391292 | 25 | 32 |
| 1391301 | 38 | 16 |
| 1391306 | 87 | 70 |
| 1391312 | 54 | 39 |
| 1391314 | 89 | 19 |
| 1391318 | 65 | 73 |
| 1391322 | 66 | 69 |
| 1391330 | 75 | 90 |
| 1391332 | 27 | 23 |
| 1391333 | 15 | 3 |
| 1391334 | 84 | 97 |
| 1391342 | 58 | 52 |
| 1391353 | 14 | 5 |
| 1391356 | 20 | 19 |
| 1391358 | 65 | 71 |
| 1391361 | 57 | 54 |
| 1391362 | 46 | 48 |
| 1391363 | 81 | 96 |
| 1394343 | 50 | 46 |
| 1394373 | 23 | 23 |
| 1394377 | 56 | 45 |
| 1394382 | 45 | 20 |
| 1394386 | 66 | 42 |

TABLE 98
Reduction of human HTT RNA in transgenic mice (n = 4)
treated with 200 μg of modified oligonucleotide

HTT RNA (% control)

| Compound ID | Spinal Cord | Cortex |
|---|---|---|
| PBS | 100 | 100 |
| 1315073 | 25 | 11 |
| 1316061 | 27 | 18 |
| 1391291 | 81 | 112 |
| 1391294 | 86 | 87 |
| 1391328 | 56 | 36 |
| 1391345 | 82 | 83 |
| 1391349 | 60 | 77 |
| 1394348 | 31 | 23 |
| 1394390 | 36 | 24 |
| 1394391 | 39 | 24 |
| 1394392 | 27 | 10 |
| 1394393 | 31 | 18 |
| 1394394 | 58 | 40 |
| 1394395 | 132 | 55 |
| 1394396 | 51 | 24 |
| 1394440 | 39 | 13 |
| 1394441 | 55 | 19 |
| 1394442 | 30 | 24 |
| 1394443 | 42 | 25 |
| 1394448 | 83 | 37 |
| 1394449 | 32 | 24 |
| 1394451 | 33 | 26 |
| 1394452 | 29 | 22 |

TABLE 99
Reduction of human HTT RNA in transgenic mice (n = 4)
treated with 200 μg of modified oligonucleotide

HTT RNA (% control)

| Compound ID | Spinal Cord | Cortex |
|---|---|---|
| PBS | 100 | 100 |
| 1315670 | 40 | 39 |
| 1391308 | 28 | 31 |
| 1391320 | 23 | 14 |
| 1391337 | 74 | 67 |
| 1391348 | 30 | 16 |
| 1391352 | 70 | 48 |
| 1391367 | 73 | 32 |
| 1394345 | 17 | 25 |
| 1394367 | 78 | 42 |
| 1394368 | 54 | 26 |
| 1394370 | 56 | 28 |
| 1394371 | 26 | 10 |
| 1394372 | 81 | 34 |
| 1394374 | 92 | 36 |
| 1394376 | 54 | 31 |
| 1394378 | 28 | 10 |
| 1394379 | 27 | 6 |
| 1394380 | 62 | 23 |
| 1394383 | 66 | 30 |
| 1394387 | 61 | 23 |
| 1394444 | 61 | 15 |
| 1394445 | 74 | 29 |
| 1394446 | 74 | 26 |

TABLE 100
Reduction of human HTT RNA in transgenic mice (n = 4)
treated with 200 μg of modified oligonucleotide

HTT RNA (% control)

| Compound ID | Spinal Cord | Cortex |
|---|---|---|
| PBS | 100 | 100 |
| 1394315 | 51 | 29 |
| 1394316 | 47 | 21 |
| 1394317 | 56 | 45 |
| 1394318 | 41 | 23 |
| 1394320 | 86 | 78 |
| 1394321 | 68 | 74 |
| 1394323 | 58 | 96 |
| 1394325 | 76 | 58 |
| 1394326 | 49 | 54 |
| 1394331 | 50 | 44 |
| 1394335 | 86 | 41 |
| 1394336 | 48 | 14 |
| 1394349 | 25 | 37 |
| 1394397 | 36 | 27 |
| 1394398 | 56 | 77 |
| 1394399 | 46 | 55 |
| 1394400 | 43 | 50 |
| 1394401 | 33 | 14 |
| 1394402 | 22 | 8 |
| 1394439 | 20 | 10 |
| 1394447 | 34 | 41 |
| 1394450 | 38 | 25 |

TABLE 101
Reduction of human HTT RNA in transgenic mice (n = 4)
treated with 200 μg of modified oligonucleotide

HTT RNA (% control)

| Compound ID | Spinal Cord | Cortex |
|---|---|---|
| PBS | 100 | 100 |
| 1314899 | 66 | 43 |
| 1315156 | 76 | 38 |
| 1315412 | 78 | 47 |
| 1315754 | 49 | 31 |
| 1315794 | 75 | 54 |
| 1316106 | 67 | 44 |
| 1316193 | 68 | 29 |
| 1316421 | 79 | 57 |
| 1316500 | 68 | 59 |
| 1316984 | 74 | 57 |

TABLE 102
Reduction of human HTT RNA in transgenic mice (n = 4)
treated with 200 μg of modified oligonucleotide

HTT RNA (% control)

| Compound ID | Spinal Cord | Cortex |
|---|---|---|
| PBS | 100 | 100 |
| 1394429 | 82 | 80 |
| 1394430 | 67 | 78 |
| 1394431 | 67 | 59 |
| 1394432 | 90 | 77 |
| 1394433 | 78 | 77 |
| 1394434 | 82 | 80 |
| 1394437 | 34 | 34 |
| 1316648 | 44 | 21 |

TABLE 103
Reduction of human HTT RNA in transgenic mice (n = 4)
treated with 200 μg of modified oligonucleotide

HTT RNA (% control)

| Compound ID | Spinal Cord | Cortex |
|---|---|---|
| PBS | 100 | 100 |
| 1316776 | 47 | 27 |
| 1391297 | 137 | 82 |
| 1391302 | 112 | 64 |
| 1391307 | 64 | 31 |
| 1391311 | 86 | 45 |
| 1391313 | 123 | 84 |
| 1391329 | 126 | 64 |
| 1391340 | 85 | 24 |
| 1391343 | 65 | 48 |
| 1391344 | 123 | 51 |
| 1391346 | 145 | 52 |
| 1391347 | 81‡ | 72 |
| 1391359 | 83 | 40 |
| 1391360 | 124 | 58 |
| 1394389 | 58 | 23 |
| 1394418 | 49 | 19 |
| 1394419 | 86 | 37 |
| 1394420 | 96 | 50 |
| 1394421 | 43 | 17 |
| 1394422 | 180 | 64 |
| 1394423 | 40 | 25 |
| 1394424 | 59 | 37 |
| 1394425 | 32 | 22 |
| 1394427 | 25 | 37 |
| 1394428 | 72 | 80 |

‡indicates that fewer than 4 samples were available

TABLE 104
Reduction of human HTT RNA in transgenic mice (n = 3)
treated with 200 μg of modified oligonucleotide

HTT RNA (% control)

| Compound ID | Spinal Cord | Cortex |
|---|---|---|
| PBS | 100 | 100 |
| 388241 | 86§ | 36§ |
| 1419360 | 39‡ | 24‡ |
| 1419361 | 90 | 61 |
| 1419362 | 108 | 39 |
| 1419365 | 136‡ | 58‡ |
| 1419370 | 67 | 57 |
| 1419374 | 164 | 84 |
| 1419375 | 115 | 41 |
| 1419376 | 82 | 23 |
| 1419379 | 100 | 52 |
| 1419380 | 102 | 39 |
| 1419383 | 128 | 34 |
| 1419384 | 133 | 56 |
| 1419386 | 29 | 12 |
| 1419389 | 82 | 39 |
| 1419392 | 84 | 10 |
| 1419394 | 133 | 29 |
| 1419406 | 73 | 56 |
| 1419407 | 157 | 136 |
| 1419409 | 182 | 132 |
| 1419414 | 135 | 47 |
| 1419419 | 134 | 71 |

‡indicates that fewer than 3 samples were available
§indicates that 4 samples were available

TABLE 105
Reduction of human HTT RNA in transgenic mice (n = 3)
treated with 200 μg of modified oligonucleotide

HTT RNA (% control)

| Compound ID | Spinal Cord | Cortex |
|---|---|---|
| PBS | 100 | 100 |
| 1419387 | 32 | 18 |
| 1419390 | 75 | 49 |
| 1419391 | 90 | 81 |
| 1419395 | 69 | 90 |
| 1419396 | 109 | 97 |
| 1419397 | 47 | 30 |
| 1419399 | 72 | 22 |
| 1419400 | 70 | 68 |
| 1419402 | 57 | 57 |
| 1419403 | 82 | 75 |
| 1419405 | 59 | 52 |
| 1419416 | 56 | 25 |
| 1419417 | 56 | 56 |
| 1419421 | 103 | 96 |
| 1419423 | 97 | 89 |
| 1419425 | 83 | 94 |

TABLE 106
Reduction of human HTT RNA in transgenic mice (n = 3)
treated with 200 μg of modified oligonucleotide

HTT RNA (% control)

| Compound ID | Spinal Cord | Cortex |
|---|---|---|
| PBS | 100 | 100 |
| 1419388 | 50 | 44 |
| 1419393 | 45 | 25 |
| 1419398 | 93 | 67 |
| 1419401 | 62 | 75 |
| 1419404 | 15 | 12 |
| 1419408 | 120 | 54 |
| 1419410 | 127 | 47 |
| 1419412 | 75 | 47 |
| 1419413 | 132 | 51 |
| 1419415 | 28 | 17 |
| 1419418 | 52 | 28 |
| 1419420 | 12 | 6 |
| 1419422 | 124 | 73 |
| 1419424 | 41 | 50 |

TABLE 107
Reduction of human HTT RNA in transgenic mice (n = 4)
treated with 300 μg of modified oligonucleotide

HTT RNA (% control)

| Compound ID | Spinal Cord | Cortex |
|---|---|---|
| PBS | 100 | 100 |
| 1316689 | 45 | 27 |
| 1456397 | 107 | 90 |
| 1456398 | 101 | 107 |
| 1456399 | 61‡ | 18‡ |
| 1456400 | 42 | 12 |
| 1456401 | 49 | 23 |
| 1456402 | 62 | 31 |
| 1456403 | 79 | 60 |
| 1456404 | 58‡ | 51‡ |
| 1456405 | 47 | 14 |
| 1456406 | 20 | 6 |
| 1456407 | 29 | 13 |
| 1456408 | 32 | 18 |
| 1456409 | 42‡ | 17‡ |
| 1456410 | 42‡ | 28‡ |
| 1456411 | 58 | 25 |
| 1456412 | 40 | 22 |
| 1456413 | 67 | 47 |

‡indicates that fewer than 4 samples were available

### Example 10: Potency of Modified Oligonucleotides Complementary to Human HTT RNA in Transgenic Mice

[0511] Modified oligonucleotides described above were tested in human HTT transgenic mice (described herein above).

### Treatment

[0512] Human HTT transgenic mice were divided into groups of 4 mice each. Each mouse received a single ICV bolus of modified oligonucleotide at the doses indicated in tables below. A group of 3-4 mice received PBS as a negative control.

### RNA Analysis

[0513] Two weeks post treatment, mice were sacrificed, and RNA was extracted from the spinal cord and cortex for quantitative real-time RTPCR analysis of RNA expression of HTT using primer probe set RTS2617 (described herein above). Results are presented as percent human HTT RNA relative to PBS control, adjusted to mouse cyclophilin A (described herein above).

[0514] Dose response and tissue concentration response data were analyzed using Microsoft Excel (v14.4) and GraphPad Prism software (v 8.2.0, San Diego, CA). ED₅₀ values were calculated from log transformed dose and individual animal HTT RNA levels using the built in GraphPad formula “log(agonist) vs. response—Find ECanything”, with the following constraints: bottom >0, top=100, and F=50 for ED50.

[0515] Each experiment is identified in separate tables below. As shown in the tables below, treatment with modified oligonucleotides resulted in dose-responsive reduction of HTT RNA in comparison to the PBS control. N.D. in the tables below refers to instances where the value was Not Defined.

TABLE 108
Reduction of human HTT RNA in transgenic mice

| | | Spinal Cord | | Cortex | |
|---|---|---|---|---|---|
| | Dose | HTT RNA | ED₅₀ | HTT RNA | ED₅₀ |
| Compound ID | (μg) | (% control) | (μg) | (% control) | (μg) |
| PBS | N/A | 100 | N/A | 100 | N/A |
| 388241 | 10 | 85 | 185.4 | 62 | 31.1 |
| | 30 | 85 | | 56 | |
| | 100 | 55 | | 30 | |
| | 300 | 44 | | 26 | |
| 444652 | 10 | 89 | 277.5 | 133 | 186.1 |
| | 30 | 95 | | 71 | |
| | 100 | 56 | | 54 | |
| | 300 | 53 | | 48 | |

TABLE 109
Reduction of human HTT RNA in transgenic mice

| | | Spinal Cord | | Cortex | |
|---|---|---|---|---|---|
| | Dose | HTT RNA | ED₅₀ | HTT RNA | ED₅₀ |
| Compound ID | (μg) | (% control) | (μg) | (% control) | (μg) |
| PBS | N/A | 100 | N/A | 100 | N/A |
| 1314967 | 3 | 82 | 45.5 | 118 | 108.5 |
| | 10 | 61 | | 95 | |
| | 30 | 61 | | 87 | |
| | 100 | 36 | | 52 | |
| | 300 | 31 | | 20 | |
| 1314979 | 3 | 147 | 73.6 | 82 | 119.2 |
| | 10 | 133 | | 73 | |
| | 30 | 98 | | 78 | |
| | 100 | 97 | | 51 | |
| | 300 | 103 | | 35 | |
| 1315343 | 3 | 163 | 124.7 | 95 | 49.1 |
| | 10 | 102 | | 67 | |
| | 30 | 80 | | 65 | |
| | 100 | 49 | | 37 | |
| | 300 | 35 | | 19 | |
| 1315578 | 3 | 113 | 156.7 | 110 | 70.6 |
| | 10 | 58 | | 103 | |
| | 30 | 96 | | 69 | |
| | 100 | 69 | | 28 | |
| | 300 | 26 | | 34 | |
| 1316218 | 3 | 68 | 106.0 | 130 | 34.3 |
| | 10 | 111‡ | | 99 | |
| | 30 | 71 | | 42 | |
| | 100 | 33 | | 25 | |
| | 300 | 26‡ | | 22‡ | |
| 1394379 | 3 | 111 | 73.6 | 121 | 37.9 |
| | 10 | 84 | | 97 | |
| | 30 | 56 | | 55 | |
| | 100 | 54 | | 20 | |
| | 300 | 18 | | 5 | |

‡indicates that fewer than 4 samples were available

TABLE 110
Reduction of human HTT RNA in transgenic mice

| | | Spinal Cord | | Cortex | |
|---|---|---|---|---|---|
| | Dose | HTT RNA | ED₅₀ | HTT RNA | ED₅₀ |
| Compound ID | (μg) | (% control) | (μg) | (% control) | (μg) |
| PBS | N/A | 100 | N/A | 100 | N/A |
| 388241 | 3 | 60 | 16.9 | 75 | 44.4 |
| | 10 | 61 | | 87 | |
| | 30 | 50 | | 51 | |
| | 100 | 24‡ | | 34‡ | |
| | 300 | 28 | | 24 | |
| 444652 | 3 | 57 | 41.1 | 75 | 47.5 |
| | 10 | 82 | | 77 | |
| | 30 | 47 | | 41 | |
| | 100 | 40 | | 52 | |
| | 300 | 34 | | 27 | |
| 627246 | 3 | 61 | 13.1 | 77 | 74.3 |
| | 10 | 42 | | 69 | |
| | 30 | 50 | | 57 | |
| | 100 | 46 | | 43 | |
| | 300 | 30 | | 41 | |

‡indicates that fewer than 4 samples were available

TABLE 111
Reduction of human HTT RNA in transgenic mice

| | | Spinal Cord | | Cortex | |
|---|---|---|---|---|---|
| | Dose | HTT RNA | ED₅₀ | HTT RNA | ED₅₀ |
| Compound ID | (μg) | (% control) | (μg) | (% control) | (μg) |
| PBS | N/A | 100 | N/A | 100 | N/A |
| 627246 | 3 | 75 | N.D. | 84 | 166.9 |
| | 10 | 68 | | 89 | |
| | 30 | 81‡ | | 81‡ | |
| | 100 | 61 | | 52 | |
| | 300 | 42 | | 46 | |
| | 700 | 35 | | 26 | |
| 1314723 | 3 | 90 | 44.6 | 69 | 12.2 |
| | 10 | 80 | | 56 | |
| | 30 | 55 | | 38 | |
| | 100 | 27 | | 16 | |
| | 300 | 28 | | 6 | |
| | 700 | 13 | | 4 | |
| 1315073 | 3 | 108 | 177.1 | 87 | 36.1 |
| | 10 | 186 | | 67 | |
| | 30 | 123 | | 62 | |
| | 100 | 45 | | 31 | |
| | 300 | 34 | | 9 | |
| | 700 | 31 | | 8 | |

‡indicates that fewer than 4 samples were available

TABLE 112
Reduction of human HTT RNA in transgenic mice

| | | Spinal Cord | | Cortex | |
|---|---|---|---|---|---|
| | Dose | HTT RNA | ED₅₀ | HTT RNA | ED₅₀ |
| Compound ID | (μg) | (% control) | (μg) | (% control) | (μg) |
| PBS | N/A | 100 | N/A | 100 | N/A |
| 388241 | 3 | 141 | 438.0 | 109 | 107.8 |
| | 10 | 87 | | 83 | |
| | 30 | 84 | | 82 | |
| | 100 | 70 | | 47 | |
| | 300 | 58 | | 28 | |
| | 700 | 45‡ | | 18‡ | |
| 1316218 | 3 | 102 | 157.9 | 63 | 30.7 |
| | 10 | 118 | | 83 | |
| | 30 | 52 | | 52 | |
| | 100 | 44 | | 30 | |
| | 300 | 48 | | 17 | |
| | 700 | 34 | | 13 | |
| 1391320 | 3 | 231 | 352.6 | 82 | 40.2 |
| | 10 | 177 | | 82 | |
| | 30 | 136 | | 55 | |
| | 100 | 99 | | 31 | |
| | 300 | 43 | | 17 | |
| | 700 | 36 | | 6 | |
| 1394347 | 3 | 69 | 1475.0 | 79 | 19.1 |
| | 10 | 97 | | 64 | |
| | 30 | 62 | | 39 | |
| | 100 | 42 | | 20 | |
| | 300 | 60 | | 16 | |
| | 700 | 65‡ | | 15‡ | |

‡indicates that fewer than 4 samples were available

TABLE 113
Reduction of human HTT RNA in transgenic mice

| | | Spinal Cord | | Cortex | |
|---|---|---|---|---|---|
| | Dose | HTT RNA | ED₅₀ | HTT RNA | ED₅₀ |
| Compound ID | (μg) | (% control) | (μg) | (% control) | (μg) |
| PBS | N/A | 100 | N/A | 100 | N/A |
| 1315813 | 3 | 83 | 63.3 | 85 | 38.4 |
| | 10 | 71 | | 76 | |
| | 30 | 67 | | 50 | |
| | 100 | 44 | | 28‡ | |
| | 300 | 28 | | 28 | |
| | 700 | 18 | | 9 | |
| 1391301 | 3 | 70 | 14.0 | 40 | 2.2 |
| | 10 | 45 | | 42 | |
| | 30 | 43 | | 37 | |
| | 100 | 33 | | 12 | |
| | 300 | 28 | | 12 | |
| | 700 | 16‡ | | 8‡ | |
| 1394371 | 3 | 63 | 24.5 | 50 | 6.7 |
| | 10 | 74 | | 62 | |
| | 30 | 49 | | 27 | |
| | 100 | 26 | | 16 | |
| | 300 | 26 | | 13 | |
| | 700 | 15 | | 6 | |
| 1394375 | 3 | 68 | 34.2 | 107 | 40.5 |
| | 10 | 65 | | 73 | |
| | 30 | 44 | | 59 | |
| | 100 | 34 | | 18 | |
| | 300 | 44 | | 26 | |
| | 700 | 29 | | 12 | |
| 1394378 | 3 | 73 | 12.8 | 96 | 26.7 |
| | 10 | 42 | | 66 | |
| | 30 | 38 | | 37 | |
| | 100 | 35 | | 36 | |
| | 300 | 25 | | 13 | |
| | 700 | 14 | | 6 | |
| 1394401 | 3 | 91 | 24.5 | 134 | 64.8 |
| | 10 | 45 | | 105 | |
| | 30 | 45 | | 47 | |
| | 100 | 28 | | 42 | |
| | 300 | 36 | | 23 | |
| | 700 | 17 | | 11 | |

‡indicates that fewer than 4 samples were available

TABLE 114
Reduction of human HTT RNA in transgenic mice

| | | Spinal Cord | | Cortex | |
|---|---|---|---|---|---|
| | Dose | HTT RNA | ED₅₀ | HTT RNA | ED₅₀ |
| Compound ID | (μg) | (% control) | (μg) | (% control) | (μg) |
| PBS | N/A | 100 | N/A | 100 | N/A |
| 1315214 | 3 | 136 | 111.4 | 40 | 2.4 |
| | 10 | 107 | | 35 | |
| | 30 | 75 | | 18 | |
| | 100 | 49 | | 20 | |
| | 300 | 30 | | 9 | |
| | 700 | N.D. | | N.D. | |
| 1394401 | 3 | 103 | 182.9 | 85 | 40.8 |
| | 10 | 94 | | 65 | |
| | 30 | 86 | | 56 | |
| | 100 | 57 | | 48 | |
| | 300 | 39 | | 11 | |
| | 700 | 28 | | 12 | |
| 1394402 | 3 | 72 | 55.4 | 61 | 8.4 |
| | 10 | 85 | | 39 | |
| | 30 | 60 | | 51 | |
| | 100 | 31 | | 23 | |
| | 300 | 31 | | 9 | |
| | 700 | 25 | | 7 | |
| 1394440 | 3 | 86 | 43.8 | 74 | 18.5 |
| | 10 | 70 | | 62 | |
| | 30 | 58 | | 44 | |
| | 100 | 36 | | 23 | |
| | 300 | 23 | | 16 | |
| | 700 | 15 | | 9 | |
| 1394444 | 3 | 145 | 244.3 | 37 | N.D. |
| | 10 | 145 | | 43 | |
| | 30 | 78 | | 38 | |
| | 100 | 55 | | 27 | |
| | 300 | 42 | | 15 | |
| | 700 | 41 | | 9 | |

TABLE 115
Reduction of human HTT RNA in transgenic mice

| | | Spinal Cord | | Cortex | |
|---|---|---|---|---|---|
| | Dose | HTT RNA | ED₅₀ | HTT RNA | ED₅₀ |
| Compound ID | (μg) | (% control) | (μg) | (% control) | (μg) |
| PBS | N/A | 100 | N/A | 100 | N/A |
| 1315578 | 3 | 114 | 111.4 | 116 | 70.0 |
| | 10 | 85 | | 80 | |
| | 30 | 76‡ | | 72‡ | |
| | 100 | 56 | | 40 | |
| | 300 | 49 | | 19 | |
| | 700 | 39 | | 10 | |

‡indicates that fewer than 4 samples were available

TABLE 116
Reduction of human HTT RNA in transgenic mice

| | | Spinal Cord | | Cortex | |
|---|---|---|---|---|---|
| | Dose | HTT RNA | ED₅₀ | HTT RNA | ED₅₀ |
| Compound ID | (μg) | (% control) | (μg) | (% control) | (μg) |
| PBS | N/A | 100 | N/A | 100 | N/A |
| 1314833 | 3 | 55 | 2.3 | 56 | 4.1 |
| | 10 | 26 | | 39 | |
| | 30 | 33‡ | | 26‡ | |
| | 100 | 17 | | 18 | |
| | 300 | 18 | | 17 | |
| | 700 | 16 | | 9 | |
| 1315921 | 3 | 77 | 17.2 | 116 | 46.8 |
| | 10 | 41 | | 57 | |
| | 30 | 49 | | 67 | |
| | 100 | 35 | | 22 | |
| | 300 | 24 | | 33 | |
| | 700 | 13‡ | | 9‡ | |
| 1394346 | 3 | 57 | 2.5 | 51 | 4.7 |
| | 10 | 21 | | 35 | |
| | 30 | 24 | | 56 | |
| | 100 | 20 | | 15 | |
| | 300 | 12 | | 11 | |
| | 700 | 11 | | 8 | |
| 1394393 | 3 | 84 | 21.4 | 125 | 55.0 |
| | 10 | 50 | | 65 | |
| | 30 | 44 | | 52 | |
| | 100 | 30 | | 44 | |
| | 300 | 25 | | 25 | |
| | 700 | 18‡ | | 11‡ | |

‡indicates that fewer than 4 samples were available

TABLE 117
Reduction of human HTT RNA in transgenic mice

| | | Spinal Cord | | Cortex | |
|---|---|---|---|---|---|
| | Dose | HTT RNA | ED₅₀ | HTT RNA | ED₅₀ |
| Compound ID | (μg) | (% control) | (μg) | (% control) | (μg) |
| PBS | N/A | 100 | N/A | 100 | N/A |
| 1315077 | 3 | 120 | 116.5 | 293 | 136.6 |
| | 10 | 67 | | 100 | |
| | 30 | 60 | | 104 | |
| | 100 | 42 | | 53 | |
| | 300 | 36 | | 21 | |
| | 700 | 43 | | 26 | |
| 1315119 | 3 | 43 | N.D. | 149 | 358.3 |
| | 10 | 31 | | 177 | |
| | 30 | 29 | | 173 | |
| | 100 | 22 | | 131 | |
| | 300 | 33 | | 58 | |
| | 700 | 19 | | 21‡ | |
| 1391348 | 3 | 95 | 359.2 | 264 | 507.1 |
| | 10 | 88 | | 122 | |
| | 30 | 88 | | 119 | |
| | 100 | 61‡ | | 111‡ | |
| | 300 | 53 | | 67 | |
| | 700 | 42 | | 38 | |
| 1394418 | 3 | 127 | 143.0 | 62 | 42.7 |
| | 10 | 76 | | 65 | |
| | 30 | 82 | | 57 | |
| | 100 | 73 | | 29 | |
| | 300 | 17 | | 55 | |
| | 700 | 16‡ | | 22‡ | |

‡indicates that fewer than 4 samples were available

### Example 11: Activity of Modified Oligonucleotides Complementary to Human HTT RNA in Transgenic Mice, Multiple Doses

[0516] Modified oligonucleotides described above were tested in human HTT transgenic mice (described herein above).

[0517] Human HTT transgenic mice were divided into groups of 4 mice each. Each mouse received a single ICV bolus of modified oligonucleotide at the various doses indicated in the table below. A group of 4 mice received PBS as a negative control.

[0518] Two weeks post treatment, mice were sacrificed, and RNA was extracted from cortical brain tissue and spinal cord for quantitative real-time RT-PCR analysis to measure the amount of HTT RNA using human primer probe set RTS2617 (described herein above) which detects total HTT RNA levels. HTT RNA levels were normalized to mouse cyclophilin A. Mouse cyclophilin A was amplified using primer probe set m_cyclo24 (described herein above). Results are presented as percent human HTT RNA relative to the amount of HTT RNA in PBS treated animals, (% control). ED50s were calculated in Prism using nonlinear fit with variable slope (four parameter), top constrained to 100% (or 1), bottom constrained to 0. Y=Bottom+(Top−Bottom)/(1+(IC50/X)\hat{ }HillSlope).

TABLE 118
Reduction of human HTT RNA in transgenic mice

| Compound | Dose | HTT (% control) | | | |
|---|---|---|---|---|---|
| No. | (ug) | Cortex | ED50 (ug) | Spinal Cord | ED50 (ug) |
| PBS | — | 100 | — | 100 | — |
| 443139 | 3 | 106 | 96 | 117 | 288 |
| | 10 | 87‡ | | 98‡ | |
| | 30 | 65 | | 84 | |
| | 100 | 50 | | 65 | |
| | 300 | 31 | | 54 | |
| 1394371 | 3 | 100 | 43 | 76 | 16 |
| | 10 | 74 | | 59 | |
| | 30 | 67 | | 36 | |
| | 100 | 25 | | 25 | |
| | 300 | 9 | | 16 | |

‡Indicates less than 4 samples were available

The application's sequence listing, which the Patent Office published only in electronic form, follows.

SEQUENCE LISTING (3707 sequences)

SEQ ID NO: 1 - DNA, 13481 bp, Homo sapiens
gctgccgggacgggtccaagatggacggccgctcaggttctgcttttacctgcggcccagagccccattcattgccccggtgctgagcggcgccgcgagtcggcccgaggcctccggggactgccgtgccgggcgggagaccgccatggcgaccctggaaaagctgatgaaggccttcgagtccctcaagtccttccagcagcagcagcagcagcagcagcagcagcagcagcagcagcagcagcagcagcagcagcagcaacagccgccaccgccgccgccgccgccgccgcctcctcagcttcctcagccgccgccgcaggcacagccgctgctgcctcagccgcagccgcccccgccgccgcccccgccgccacccggcccggctgtggctgaggagccgctgcaccgaccaaagaaagaactttcagctaccaagaaagaccgtgtgaatcattgtctgacaatatgtgaaaacatagtggcacagtctgtcagaaattctccagaatttcagaaacttctgggcatcgctatggaactttttctgctgtgcagtgatgacgcagagtcagatgtcaggatggtggctgacgaatgcctcaacaaagttatcaaagctttgatggattctaatcttccaaggttacagctcgagctctataaggaaattaaaaagaatggtgcccctcggagtttgcgtgctgccctgtggaggtttgctgagctggctcacctggttcggcctcagaaatgcaggccttacctggtgaaccttctgccgtgcctgactcgaacaagcaagagacccgaagaatcagtccaggagaccttggctgcagctgttcccaaaattatggcttcttttggcaattttgcaaatgacaatgaaattaaggttttgttaaaggccttcatagcgaacctgaagtcaagctcccccaccattcggcggacagcggctggatcagcagtgagcatctgccagcactcaagaaggacacaatatttctatagttggctactaaatgtgctcttaggcttactcgttcctgtcgaggatgaacactccactctgctgattcttggcgtgctgctcaccctgaggtatttggtgcccttgctgcagcagcaggtcaaggacacaagcctgaaaggcagcttcggagtgacaaggaaagaaatggaagtctctccttctgcagagcagcttgtccaggtttatgaactgacgttacatcatacacagcaccaagaccacaatgttgtgaccggagccctggagctgttgcagcagctcttcagaacgcctccacccgagcttctgcaaaccctgaccgcagtcgggggcattgggcagctcaccgctgctaaggaggagtctggtggccgaagccgtagtgggagtattgtggaacttatagctggagggggttcctcatgcagccctgtcctttcaagaaaacaaaaaggcaaagtgctcttaggagaagaagaagccttggaggatgactctgaatcgagatcggatgtcagcagctctgccttaacagcctcagtgaaggatgagatcagtggagagctggctgcttcttcaggggtttccactccagggtcagcaggtcatgacatcatcacagaacagccacggtcacagcacacactgcaggcggactcagtggatctggccagctgtgacttgacaagctctgccactgatggggatgaggaggatatcttgagccacagctccagccaggtcagcgccgtcccatctgaccctgccatggacctgaatgatgggacccaggcctcgtcgcccatcagcgacagctcccagaccaccaccgaagggcctgattcagctgttaccccttcagacagttctgaaattgtgttagacggtaccgacaaccagtatttgggcctgcagattggacagccccaggatgaagatgaggaagccacaggtattcttcctgatgaagcctcggaggccttcaggaactcttccatggcccttcaacaggcacatttattgaaaaacatgagtcactgcaggcagccttctgacagcagtgttgataaatttgtgttgagagatgaagctactgaaccgggtgatcaagaaaacaagccttgccgcatcaaaggtgacattggacagtccactgatgatgactctgcacctcttgtccattgtgtccgccttttatctgcttcgtttttgctaacagggggaaaaaatgtgctggttccggacagggatgtgagggtcagcgtgaaggccctggccctcagctgtgtgggagcagctgtggccctccacccggaatctttcttcagcaaactctataaagttcctcttgacaccacggaataccctgaggaacagtatgtctcagacatcttgaactacatcgatcatggagacccacaggttcgaggagccactgccattctctgtgggaccctcatctgctccatcctcagcaggtcccgcttccacgtgggagattggatgggcaccattagaaccctcacaggaaatacattttctttggcggattgcattcctttgctgcggaaaacactgaaggatgagtcttctgttacttgcaagttagcttgtacagctgtgaggaactgtgtcatgagtctctgcagcagcagctacagtgagttaggactgcagctgatcatcgatgtgctgactctgaggaacagttcctattggctggtgaggacagagcttctggaaacccttgcagagattgacttcaggctggtgagctttttggaggcaaaagcagaaaacttacacagaggggctcatcattatacagggcttttaaaactgcaagaacgagtgctcaataatgttgtcatccatttgcttggagatgaagaccccagggtgcgacatgttgccgcagcatcactaattaggcttgtcccaaagctgttttataaatgtgaccaaggacaagctgatccagtagtggccgtggcaagagatcaaagcagtgtttacctgaaacttctcatgcatgagacgcagcctccatctcatttctccgtcagcacaataaccagaatatatagaggctataacctactaccaagcataacagacgtcactatggaaaataacctttcaagagttattgcagcagtttctcatgaactaatcacatcaaccaccagagcactcacatttggatgctgtgaagctttgtgtcttctttccactgccttcccagtttgcatttggagtttaggttggcactgtggagtgcctccactgagtgcctcagatgagtctaggaagagctgtaccgttgggatggccacaatgattctgaccctgctctcgtcagcttggttcccattggatctctcagcccatcaagatgctttgattttggccggaaacttgcttgcagccagtgctcccaaatctctgagaagttcatgggcctctgaagaagaagccaacccagcagccaccaagcaagaggaggtctggccagccctgggggaccgggccctggtgcccatggtggagcagctcttctctcacctgctgaaggtgattaacatttgtgcccacgtcctggatgacgtggctcctggacccgcaataaaggcagccttgccttctctaacaaaccccccttctctaagtcccatccgacgaaaggggaaggagaaagaaccaggagaacaagcatctgtaccgttgagtcccaagaaaggcagtgaggccagtgcagcttctagacaatctgatacctcaggtcctgttacaacaagtaaatcctcatcactggggagtttctatcatcttccttcatacctcaaactgcatgatgtcctgaaagctacacacgctaactacaaggtcacgctggatcttcagaacagcacggaaaagtttggagggtttctccgctcagccttggatgttctttctcagatactagagctggccacactgcaggacattgggaagtgtgttgaagagatcctaggatacctgaaatcctgctttagtcgagaaccaatgatggcaactgtttgtgttcaacaattgttgaagactctctttggcacaaacttggcctcccagtttgatggcttatcttccaaccccagcaagtcacaaggccgagcacagcgccttggctcctccagtgtgaggccaggcttgtaccactactgcttcatggccccgtacacccacttcacccaggccctcgctgacgccagcctgaggaacatggtgcaggcggagcaggagaacgacacctcgggatggtttgatgtcctccagaaagtgtctacccagttgaagacaaacctcacgagtgtcacaaagaaccgtgcagataagaatgctattcataatcacattcgtttgtttgaacctcttgttataaaagctttaaaacagtacacgactacaacatgtgtgcagttacagaagcaggttttagatttgctggcgcagctggttcagttacgggttaattactgtcttctggattcagatcaggtgtttattggctttgtattgaaacagtttgaatacattgaagtgggccagttcagggaatcagaggcaatcattccaaacatctttttcttcttggtattactatcttatgaacgctatcattcaaaacagatcattggaattcctaaaatcattcagctctgtgatggcatcatggccagtggaaggaaggctgtgacacatgccataccggctctgcagcccatagtccacgacctctttgtattaagaggaacaaataaagctgatgcaggaaaagagcttgaaacccaaaaagaggtggtggtgtcaatgttactgagactcatccagtaccatcaggtgttggagatgttcattcttgtcctgcagcagtgccacaaggagaatgaagacaagtggaagcgactgtctcgacagatagctgacatcatcctcccaatgttagccaaacagcagatgcacattgactctcatgaagcccttggagtgttaaatacattatttgagattttggccccttcctccctccgtccggtagacatgcttttacggagtatgttcgtcactccaaacacaatggcgtccgtgagcactgttcaactgtggatatcgggaattctggccattttgagggttctgatttcccagtcaactgaagatattgttctttctcgtattcaggagctctccttctctccgtatttaatctcctgtacagtaattaataggttaagagatggggacagtacttcaacgctagaagaacacagtgaagggaaacaaataaagaatttgccagaagaaacattttcaaggtttctattacaactggttggtattcttttagaagacattgttacaaaacagctgaaggtggaaatgagtgagcagcaacatactttctattgccaggaactaggcacactgctaatgtgtctgatccacatcttcaagtctggaatgttccggagaatcacagcagctgccactaggctgttccgcagtgatggctgtggcggcagtttctacaccctggacagcttgaacttgcgggctcgttccatgatcaccacccacccggccctggtgctgctctggtgtcagatactgctgcttgtcaaccacaccgactaccgctggtgggcagaagtgcagcagaccccgaaaagacacagtctgtccagcacaaagttacttagtccccagatgtctggagaagaggaggattctgacttggcagccaaacttggaatgtgcaatagagaaatagtacgaagaggggctctcattctcttctgtgattatgtctgtcagaacctccatgactccgagcacttaacgtggctcattgtaaatcacattcaagatctgatcagcctttcccacgagcctccagtacaggacttcatcagtgccgttcatcggaactctgctgccagcggcctgttcatccaggcaattcagtctcgttgtgaaaacctttcaactccaaccatgctgaagaaaactcttcagtgcttggaggggatccatctcagccagtcgggagctgtgctcacgctgtatgtggacaggcttctgtgcacccctttccgtgtgctggctcgcatggtcgacatccttgcttgtcgccgggtagaaatgcttctggctgcaaatttacagagcagcatggcccagttgccaatggaagaactcaacagaatccaggaataccttcagagcagcgggctcgctcagagacaccaaaggctctattccctgctggacaggtttcgtctctccaccatgcaagactcacttagtccctctcctccagtctcttcccacccgctggacggggatgggcacgtgtcactggaaacagtgagtccggacaaagactggtacgttcatcttgtcaaatcccagtgttggaccaggtcagattctgcactgctggaaggtgcagagctggtgaatcggattcctgctgaagatatgaatgccttcatgatgaactcggagttcaacctaagcctgctagctccatgcttaagcctagggatgagtgaaatttctggtggccagaagagtgccctttttgaagcagcccgtgaggtgactctggcccgtgtgagcggcaccgtgcagcagctccctgctgtccatcatgtcttccagcccgagctgcctgcagagccggcggcctactggagcaagttgaatgatctgtttggggatgctgcactgtatcagtccctgcccactctggcccgggccctggcacagtacctggtggtggtctccaaactgcccagtcatttgcaccttcctcctgagaaagagaaggacattgtgaaattcgtggtggcaacccttgaggccctgtcctggcatttgatccatgagcagatcccgctgagtctggatctccaggcagggctggactgctgctgcctggccctgcagctgcctggcctctggagcgtggtctcctccacagagtttgtgacccacgcctgctccctcatctactgtgtgcacttcatcctggaggccgttgcagtgcagcctggagagcagcttcttagtccagaaagaaggacaaataccccaaaagccatcagcgaggaggaggaggaagtagatccaaacacacagaatcctaagtatatcactgcagcctgtgagatggtggcagaaatggtggagtctctgcagtcggtgttggccttgggtcataaaaggaatagcggcgtgccggcgtttctcacgccattgctaaggaacatcatcatcagcctggcccgcctgccccttgtcaacagctacacacgtgtgcccccactggtgtggaagcttggatggtcacccaaaccgggaggggattttggcacagcattccctgagatccccgtggagttcctccaggaaaaggaagtctttaaggagttcatctaccgcatcaacacactaggctggaccagtcgtactcagtttgaagaaacttgggccaccctccttggtgtcctggtgacgcagcccctcgtgatggagcaggaggagagcccaccagaagaagacacagagaggacccagatcaacgtcctggccgtgcaggccatcacctcactggtgctcagtgcaatgactgtgcctgtggccggcaacccagctgtaagctgcttggagcagcagccccggaacaagcctctgaaagctctcgacaccaggtttgggaggaagctgagcattatcagagggattgtggagcaagagattcaagcaatggtttcaaagagagagaatattgccacccatcatttatatcaggcatgggatcctgtcccttctctgtctccggctactacaggtgccctcatcagccacgagaagctgctgctacagatcaaccccgagcgggagctggggagcatgagctacaaactcggccaggtgtccatacactccgtgtggctggggaacagcatcacacccctgagggaggaggaatgggacgaggaagaggaggaggaggccgacgcccctgcaccttcgtcaccacccacgtctccagtcaactccaggaaacaccgggctggagttgacatccactcctgttcgcagtttttgcttgagttgtacagccgctggatcctgccgtccagctcagccaggaggaccccggccatcctgatcagtgaggtggtcagatcccttctagtggtctcagacttgttcaccgagcgcaaccagtttgagctgatgtatgtgacgctgacagaactgcgaagggtgcacccttcagaagacgagatcctcgctcagtacctggtgcctgccacctgcaaggcagctgccgtccttgggatggacaaggccgtggcggagcctgtcagccgcctgctggagagcacgctcaggagcagccacctgcccagcagggttggagccctgcacggcgtcctctatgtgctggagtgcgacctgctggacgacactgccaagcagctcatcccggtcatcagcgactatctcctctccaacctgaaagggatcgcccactgcgtgaacattcacagccagcagcacgtactggtcatgtgtgccactgcgttttacctcattgagaactatcctctggacgtagggccggaattttcagcatcaataatacagatgtgtggggtgatgctgtctggaagtgaggagtccaccccctccatcatttaccactgtgccctcagaggcctggagcgcctcctgctctctgagcagctctcccgcctggatgcagaatcgctggtcaagctgagtgtggacagagtgaacgtgcacagcccgcaccgggccatggcggctctgggcctgatgctcacctgcatgtacacaggaaaggagaaagtcagtccgggtagaacttcagaccctaatcctgcagcccccgacagcgagtcagtgattgttgctatggagcgggtatctgttctttttgataggatcaggaaaggctttccttgtgaagccagagtggtggccaggatcctgccccagtttctagacgacttcttcccaccccaggacatcatgaacaaagtcatcggagagtttctgtccaaccagcagccatacccccagttcatggccaccgtggtgtataaggtgtttcagactctgcacagcaccgggcagtcgtccatggtccgggactgggtcatgctgtccctctccaacttcacgcagagggccccggtcgccatggccacgtggagcctctcctgcttctttgtcagcgcgtccaccagcccgtgggtcgcggcgatcctcccacatgtcatcagcaggatgggcaagctggagcaggtggacgtgaaccttttctgcctggtcgccacagacttctacagacaccagatagaggaggagctcgaccgcagggccttccagtctgtgcttgaggtggttgcagccccaggaagcccatatcaccggctgctgacttgtttacgaaatgtccacaaggtcaccacctgctgagcgccatggtgggagagactgtgaggcggcagctggggccggagcctttggaagtctgcgcccttgtgccctgcctccaccgagccagcttggtccctatgggcttccgcacatgccgcgggcggccaggcaacgtgcgtgtctctgccatgtggcagaagtgctctttgtggcagtggccaggcagggagtgtctgcagtcctggtggggctgagcctgaggccttccagaaagcaggagcagctgtgctgcaccccatgtgggtgaccaggtcctttctcctgatagtcacctgctggttgttgccaggttgcagctgctcttgcatctgggccagaagtcctccctcctgcaggctggctgttggcccctctgctgtcctgcagtagaaggtgccgtgagcaggctttgggaacactggcctgggtctccctggtggggtgtgcatgccacgccccgtgtctggatgcacagatgccatggcctgtgctgggccagtggctgggggtgctagacacccggcaccattctcccttctctcttttcttctcaggatttaaaatttaattatatcagtaaagagattaattttaacgtaactctttctatgcccgtgtaaagtatgtgaatcgcaaggcctgtgctgcatgcgacagcgtccggggtggtggacagggcccccggccacgctccctctcctgtagccactggcatagccctcctgagcacccgctgacatttccgttgtacatgttcctgtttatgcattcacaaggtgactgggatgtagagaggcgttagtgggcaggtggccacagcaggactgaggacaggcccccattatcctaggggtgcgctcacctgcagcccctcctcctcgggcacagacgactgtcgttctccacccaccagtcagggacagcagcctccctgtcactcagctgagaaggccagccctccctggctgtgagcagcctccactgtgtccagagacatgggcctcccactcctgttccttgctagccctggggtggcgtctgcctaggagctggctggcaggtgttgggacctgctgctccatggatgcatgccctaagagtgtcactgagctgtgttttgtctgagcctctctcggtcaacagcaaagcttggtgtcttggcactgttagtgacagagcccagcatcccttctgcccccgttccagctgacatcttgcacggtgaccccttttagtcaggagagtgcagatctgtgctcatcggagactgccccacggccctgtcagagccgccactcctatccccaggccaggtccctggaccagcctcctgtttgcaggcccagaggagccaagtcattaaaatggaagtggattctggatggccgggctgctgctgatgtaggagctggatttgggagctctgcttgccgactggctgtgagacgaggcaggggctctgcttcctcagccctagaggcgagccaggcaaggttggcgactgtcatgtggcttggtttggtcatgcccgtcgatgttttgggtattgaatgtggtaagtggaggaaatgttggaactctgtgcaggtgctgccttgagacccccaagcttccacctgtccctctcctatgtggcagctggggagcagctgagatgtggacttgtatgctgcccacatacgtgagggggagctgaaagggagcccctcctctgagcagcctctgccaggcctgtatgaggcttttcccaccagctcccaacagaggcctcccccagccaggaccacctcgtcctcgtggcggggcagcaggagcggtagaaaggggtccgatgtttgaggaggcccttaagggaagctactgaattataacacgtaagaaaatcaccattccgtattggttgggggctcctgtttctcatcctagctttttcctggaaagcccgctagaaggtttgggaacgaggggaaagttctcagaactgttggctgctccccacccgcctcccgcctcccccgcaggttatgtcagcagctctgagacagcagtatcacaggccagatgttgttcctggctagatgtttacatttgtaagaaataacactgtgaatgtaaaacagagccattcccttggaatgcatatcgctgggctcaacatagagtttgtcttcctcttgtttacgacgtgatctaaaccagtccttagcaaggggctcagaacaccccgctctggcagtaggtgtcccccacccccaaagacctgcctgtgtgctccggagatgaatatgagctcattagtaaaaatgacttcacccacgcatatacataaagtatccatgcatgtgcatatagacacatctataattttacacacacacctctcaagacggagatgcatggcctctaagagtgcccgtgtcggttcttcctggaagttgactttccttagacccgccaggtcaagttagccgcgtgacggacatccaggcgtgggacgtggtcagggcagggctcattcattgcccactaggatcccactggcgaagatggtctccatatcagctctctgcagaagggaggaagactttatcatgttcctaaaaatctgtggcaagcacccatcgtattatccaaattttgttgcaaatgtgattaatttggttgtcaagttttgggggtgggctgtggggagattgcttttgttttcctgctggtaatatcgggaaagattttaatgaaaccagggtagaattgtttggcaatgcactgaagcgtgtttctttcccaaaatgtgcctcccttccgctgcgggcccagctgagtctatgtaggtgatgtttccagctgccaagtgctctttgttactgtccaccctcatttctgccagcgcatgtgtcctttcaaggggaaaatgtgaagctgaaccccctccagacacccagaatgtagcatctgagaaggccctgtgccctaaaggacacccctcgcccccatcttcatggagggggtcatttcagagccctcggagccaatgaacagctcctcctcttggagctgagatgagccccacgtggagctcgggacggatagtagacagcaataactcggtgtgtggccgcctggcaggtggaacttcctcccgttgcggggtggagtgaggttagttctgtgtgtctggtgggtggagtcaggcttctcttgctacctgtgagcatccttcccagcagacatcctcatcgggctttgtccctcccccgcttcctccctctgcggggaggacccgggaccacagctgctggccagggtagacttggagctgtcctccagaggggtcacgtgtaggagtgagaagaaggaagatcttgagagctgctgagggaccttggagagctcaggatggctcagacgaggacactcgcttgccgggcctgggcctcctgggaaggagggagctgctcagaatgccgcatgacaactgaaggcaacctggaaggttcaggggccgctcttcccccatgtgcctgtcacgctctggtgcagtcaaaggaacgccttcccctcagttgtttctaagagcagagtctcccgctgcaatctgggtggtaactgccagccttggaggatcgtggccaacgtggacctgcctacggagggtgggctctgacccaagtggggcctccttgtccaggtctcactgctttgcaccgtggtcagagggactgtcagctgagcttgagctcccctggagccagcagggctgtgatgggcgagtcccggagccccacccagacctgaatgcttctgagagcaaagggaaggactgacgagagatgtatatttaattttttaactgctgcaaacattgtacatccaaattaaaggaaaaaaatggaaaccatca

SEQ ID NO: 2 - DNA, 172001 bp, Homo sapiens
cctgcaggggcctctccagctcactgggggtggggtgggggtcacacttggggtcctcaggtcgtgccgaccacgcgcattctctgcgctctgcgcaggagctcgcccaccctctccccgtgcagagagccccgcagctggctccccgcagggctgtccgggtgagtatggctctggccacgggccagtgtggcgggagggcaaaccccaaggccacctcggctcagagtccacggccggctgtcgccccgctccaggcgtcggcgggggatcctttccgcatgggcctgcgcccgcgctcggcgccccctccacggccccgccccgtccatggccccgtccttcatgggcgagcccctccatggccctgcccctccgcgccccacccctccctcgccccacctctcaccttcctgccccgcccccagcctccccaaccctcaccggccagtcccctcccctatcccgtccgcccctcagccgccccgcccctcagccggcctgcctaatgtccccgtccccagcatcgccccgccccgcccccgtctcgccccgcccctcaggcggcctccctgctgtgccccgccccggcctcgccacgcccctacctcaccacgccccccgcatcgccacgccccccgcatcgccacgcctcccttaccatgcagtcccgccccgtcccttcctcgtcccgcctcgccgcgacacttcacacacagcttcgcctcaccccattacagtctcaccacgccccgtcccctctccgttgagccccgcgccttcgcccgggtggggcgctgcgctgtcagcggccttgctgtgtgaggcagaacctgcgggggcaggggcgggctggttccctggccagccattggcagagtccgcaggctagggctgtcaatcatgctggccggcgtggccccgcctccgccggcgcggccccgcctccgccggcgcagcgtctgggacgcaaggcgccgtgggggctgccgggacgggtccaagatggacggccgctcaggttctgcttttacctgcggcccagagccccattcattgccccggtgctgagcggcgccgcgagtcggcccgaggcctccggggactgccgtgccgggcgggagaccgccatggcgaccctggaaaagctgatgaaggccttcgagtccctcaagtccttccagcagcagcagcagcagcagcagcagcagcagcagcagcagcagcagcagcagcagcaacagccgccaccgccgccgccgccgccgccgcctcctcagcttcctcagccgccgccgcaggcacagccgctgctgcctcagccgcagccgcccccgccgccgcccccgccgccacccggcccggctgtggctgaggagccgctgcaccgaccgtgagtttgggcccgctgcagctccctgtcccggcgggtcccaggctacggcggggatggcggtaaccctgcagcctgcgggccggcgacacgaacccccggccccgcagagacagagtgacccagcaacccagagcccatgagggacacccgccccctcctggggcgaggccttcccccacttcagccccgctccctcacttgggtcttcccttgtcctctcgcgaggggaggcagagccttgttggggcctgtcctgaattcaccgaggggagtcacggcctcagccctctcgcccttcgcaggatgcgaagagttggggcgagaacttgtttctttttatttgcgagaaaccagggcgggggttcttttaactgcgttgtgaagagaacttggaggagccgagatttgctcagtgccacttccctcttctagtctgagagggaagagggctgggggcgcgggacacttcgagaggaggcggggtttggagctggagagatgtgggggcagtggatgacataatgcttttaggacgcctcggcgggagtggcggggcagggggggggcggggagtgagggcgcgtccaatgggagatttcttttcctagtggcacttaaaacagcctgagatttgaggctcttcctacattgtcaggacatttcatttagttcatgatcacggtggtagtaacacgattttaagcaccacctaagagatctgctcatctaagcctaagttggtctgcaggcgtttgaatgagttgtggttgccaagtaaagtggtgaacttacgtggtgattaatgaaattatcttaaatattaggaagagttgattgaagttttttgcctatgtgtgttgggaataaaaccaacacgttgctgatggggaggttaattgccgagggatgaatgaggtgtacattttaccagtattccagtcaggcttgccagaatacggggggtccgcagactccgtgggcatctcagatgtgccagtgaaagggtttctgtttgcttcattgctgacagcttgttactttttggaagctaggggtttctgttgcttgttcttggggagaatttttgaaacaggaaaagagagaccattaaaacatctagcggaaccccaggactttccctggaagtctgtgtgtcgagtgtacagtaggagttaggaagtactctggtgcagttcaggcctttctcttacctctcagtattctatttccgatctggatgtgtcccagatggcatttggtaagaatatctctgttaagactgattaatttttagtaatatttcttgttctttgtttctgttatgatccttgtctcgtcttcaaagtttaattagaaaatgattcggagagcagtgttagcttatttgttggaataaaatttaggaataaattattctaaaggatggaaaaactttttggatatttggagaaattttaaaacaatttggcttatctcttcagtaagtaatttctcatccagaaatttactgtagtgcttttctaggaggtaggtgtcataaaagttcacacattgcatgtatcttgtgtaaacactaaacagggctcctgatgggaaggaagacctttctgctgggctgcttcagacacttgatcattctaaaaatatgccttctctttcttatgctgatttgacagaacctgcatttgcttatcttcaaaatatgggtatcaagaaatttcctttgctgccttgacaaaggagatagattttgtttcattactttaaggtaatatatgattaccttatttaaaaaatttaatcaggactggcaaggtggcttacacctttaatccgagcactttgggaggcctaggtggacgaatcacctgaggtcaggagtttgagaccagcctggctaacatggtgaaaccctgtctctactaaaaatacaaaaattagctggtcatggtggcacgtgcctgtaatccaagctacctgggaggctgaggcaggaaaatcgcttgaacccgggaggcagagtctgcagtgagttgagatcacgccactgcactccagcctgggtgacagagcgagactctatctcaaaaaaaattttttttaatgtattatttttgcataagtaatacattgacatgatacaaattctgtaattacaaaagggcaataattaaaatatcttccttccacccctttcctctgagtacctaactttgtccccaagaacaagcactatttcagttcctcatgtatcctgccagatataacctgttcatattgtaagatagatttaaaatgctctaaaaacaaaagtagtttagaataatatatatctatatattttttgagatgtagtctcacattgtcacccaggctggagtgcagtgatacaatctcggctcactgcagtctctgcctcccaggttcaaatgcttctcctgcctcagccttctgagtagctgggattacaggcgcccaccaccatgtccagctaatttttgtatttttagtagagatggggtttcaccatgttggccaggctggtcttgaactcctgaccttgtgatctgtccacctcggcctcccaaagtgctgggattacaggtgtgagccaccatgcctggctagaataataacttttaaaggttcttagcatgctctgaaatcaactgcattaggtttatttatagttttatagttattttaaataaaatgcatatttgtcatatttctctgtattttgctgttgagaaaggaggtattcactaattttgagtaacaaacactgctcacaaagtttggattttggcagttctgttcacgtgcttcagccaaaaaatcctcttctcaaagtaagattgatgaaagcaatttagaaagtatctgttctgtttttatggctcttgctctttggtgtggaactgtggtgtcacgccatgcatgggcctcagtttatgagtgtttgtgctctgctcagcatacaggatgcaggagttccttatggggctggctgcaggctcagcaaatctagcatgcttgggagggtcctcacagtaattaggaggcaattaatacttgcttctggcagtttcttattctccttcagattcctatctggtgtttccctgactttattcattcatcagtaaatatttactaaacatgtactatgtgcctggcactgttataggtgcagggctcagcagtgagcagacaaagctctgccctcgtgaagctttcattctaatgaaggacatagacagtaagcaagatagataagtaaaatatacagtacgttaatacgtggaggaacttcaaagcagggaaggggatagggaaatgtcagggttaatcgagtgttaacttatttttatttttaaaaaaattgttaagggctttccagcaaaacccagaaagcctgctagacaaattccaaaagagctgtagcactaagtgttgacatttttattttattttgttttgttttgttttttttgagacagttcttgctctatcagccaggctggagtgcactagtgtgatcttggctcactgcaacctctgcctcttgggttcaagtgattctcatgcctcagcctcctgtttagctgggattatagacatgcactgccatgcctgggtaattttttttttttcccccgagacggagtcttgctctgtcgcccaggctggagtgcagtggcgcgatctcagctcactgcaagctccgcttcccgagttcacgccattctcctgcctcagtctcccaagtagctgggactacaggcgcctgccaccacgtccagctaatttttttgtatttttaatagagacggggtttcaccgtgttagccaggatgatcttgatctcctgacctcgtcatccgccgaccttgtgatccgcccacctcggcctcccaaagtgctgggattacaggcatgagccactgtgcccggccacgcctgggtaatttttgtatttttagtagagatggggttttgccatgatgagcaggctggtctcgaactcccggcctcatgtgatctgcctgccttggcctcccaaagtgctaggattacaggcatgagccaccatacctggccagtgttgatattttaaatacggtgttcagggaaggtccactgagaagacagctttttttttttttttttttggggttggggggcaaggtcttgctctttaacccaggctggaatgcagtatcactatcgtagctcacttcagccttgaactcctgggctcaagtgatcctcccacctcaacctcacaatgtgttgggactataggtgtgagccatcacacctggccagatgatggcttttgagtaaagacctcaagcgagttaagagtctagtgtaagggtgtatgaagtagtggtattccagatggggggaacaggtccaaaatcttcctgtttcaggaatagcaaggatgtcattttagttgggtgaattgagtgagggggacatttgtagtaagaagtaaggtccaagaggtcaagggagtgccatatcagaccaatactacttgccttgtagatggaataaagatattggcatttatgtgagtgagatgggatgtcactggaggattagagcagaggagtagcatgatctgaatttcaatcttaagtgaactctggctgacaacagagtgaaggggaacaccggcaaaagcagaaaccagttaggaagccactgcagtgctcagataagcatggtgggttctgtcagggtaccggctgtcggctgtgggcagtgtgaggaatgactgactggattttgaatgcggaaccaactgcacttgttgaactctgctaagtataacaatttagcagtagcttgcgttatcaggtttgtattcagctgcaagtaacagaaaatcctgctgcaatagcttaaactggtaacaagcaagagcttatcagaagacaaaaataagtctggggaaattcaacaataagttaaggaacccaggctctttcttttttttttttttgaaacggagtttcgctcttgtcacccgggctggagtgcaatgatgtgatctcagctcactaaaacctctacctcctgggttcaagtgattcttctgcctcagcctcccaagtaactgggattacaggcgtataccaccatgcccagctaatttttgtgtttttagtagagatggggtttcaccatgttggccaggctggtctcgaacttctgacctcaggtgatccactcgcctcagcctgccaaagtgctgggattacaggtttgggccactgcacccggtcagaacccaggctctttcttatacttaccttgcaaacccttgttctcattttttccctttgtatttttattgttgaattgtaatagttctttatatattctggatactggattcttatcagatagatgatttgtaaaaactctcccttcctttggattgtctttttactttcttgatagtgtcttttgaagtgtaaaagtttttaattttgatgaagtcgagtttatctattttgtctttggttgctgtgcttcaagtgtcatatctaagaaatcattgtctaatccaaagtcaaaaaggtttactcctatgttttcttctaagaattttagagttttacatttaagtctgatccattttgagttaatttttatatatggttcaggtagaagtccaactttattcttttccatgtggttattcagttgtcccagcactgtttgttgaagagactattctttccccatggaattatcttagtacccttgttgaaaattaatcgtccttaattgtataaatttatttctagactgtcagttctacctgttggtctttatgtcgatcctgtgccagtaccatacagtcttgattactgaagtttgtgtcacagtttaaattcatgaaatgtgagttctccaactttgttccttttcaagattgatttggccatgctgggtcccttgcatttccgtacgaattgtaggatcagcttgtcagtttcaacaaagaagccaagtaggattctgagagggattgtgttgaatctgtagatcaacttggggagtattcgcatcttaacaatattgtcttccacctatgaacatgggcaaactttgtgtaaatggtcagattgtaagtatttcgggctgtgtgggcacagtgtctctgtcacagctacgcggctctgccattgtagcatgaaagtagccataagcaatatgtatgagtgtctgtgttccaatagaattttattaatgacaaggaagtttgaatttcatataattttcacctgtcatgagatagtatttgattattttggtcaaccatttaaaaatgtaaaaacatttcttagcttgtgaactagccaaaaatatgcaggttatagttttcccactcctaggttaaaatatgataggaccacatttggaaagcatttctttttttttttttttttttttttttgagacggagtttcactcttgttgcccaggctggagtgcagtggcgcgatctcggctcactgcaacctctgcctcccaggttcaagacattctcctgcacggcctccctagtagctgggattacaggcatgcgccaccacacccagctaattttgtatttttagtagagacggggtttctccatgttggtcaggctggtcttgaactcctgacctcaggtgatccacccgcctcagcctcccaaagtgctgggattacagggtgtgagccaccacaccctgctggaaagcatttcttttttggctgtttttgttttttttttaaactagttttgaaaattataaaagttacacatatacattataaaaatatcttcaagcagcacagatgaaaaacaaagcccttcttgcaagtctgtcatctttgtctaacttcctaagaacaaaagtgtttcttgtgtcttcttcccagattttaatatgcatatacaagcatttaaatgtgtcattttttgtttgcttgactgagatcacattacatatgtatttttttacttaacaatgtgtcatagatattgttccatagcagtacctgtaattcttattaattgctatgtaatattttagaatttctttttaaaagaggacttttggagatgtaaaggcaaaggtctcacatttttgtggctgtagaatgtgctggtgacatattctctctaccttgagaagtccccatccccatcacctccatttcctgtaaataagtcaaccacttgataaactacctttgaatggatccacactcaaaacatttagtcttattcagacaacaaggaggaaaaataaaataccttataaagcactgtttaatattgtattaaattggatcaatttgggggctagaatgtatgttagagacatgatatgtccataggtccttgctatcacagtgaggtctcagggacagtcgtttggtatcatttgggatctcataagcagactctctctgcttgacctgacaaatcagagtctgtgttttaacaggttcagtgagtgacttacatgcacattggagtttgggaagctccactgtaggtgcttagaccttacctttgttgttgctaataacaatgcaagcatttgggaggaagacctgtgttgctcatatgtgtccaggtgtagctgaggtggccttgcttatctgctgtagggccgttgagcatttctgtagctgtgatgagtgagctgaggtgagcctgcggagagctcccagccattggtagtgggactcgcttagatgaactggaaggaccctttcatctgagcagccactatggagaaaaacaaccgaatgaggggagagacaatgtgcaattttatttagggcacaaaggagagctgtggttagaaggtgacatttgagtggaaagggggcaagccatgtgtatagcgggagaagagaggtccaggcagagttaacagaaggcagaaatgctttccatgtttgagaaccagtaaggaggccagtggctgaagtaaggtgaagggcagaaataaggatgaggctgcgagagatgagaggttagagacgagcgtcttgtgcaccaagataagcttgtgtggtcaaaacaagtagtttaatttatgtttttaaaagatcattttggctgggcacaatggttcatgcctgtaataccagtagtttgagacggtgtggtgggaggattgcctgaggccagacgaccagcatagccaacatagcagcacctataaggtctctacaaaaaactttaaaaaattagctgggcatagtggtgtgtgcctgtagtcccagctactcaggaggctgaggaggctggaggattgcttgagtccaggagtttgaggctgcagtgagctatgattatgccactacactacaacctgggcaagagagtgagaccctgtctctaaatatacacacacacacacacacacacacacacacacacacacacacacacacacacacacatatatatgtatatatatgcatttagatgaaaagatcactttgacaataccacatgctggtgaggatttagaaaaactaggtcacttattgctggtgggaatataatatagtacggccactctggaaaacagtttggcagtttgtcataaaactgaacataccgttagtatacagcccagcagcaactacaatcctgggcattaatcctagagaaatgaaaccttaatgttcacataaaaacctatactcaagtatgcatagcagctttacccataatatctaagaactggaatcagctcagatgtccttcaacaggtgaatggttaaactactcagtaataaaaaggaatgagctactgatagcatgcaacagtttaggtgaagttatgctaatgaaaaaagccaatcccaaaaggttatacatactgtatgattctatgtttttttgcaatggcacagttttagggatggagaatagattagtggttgcctggggttagagatggggtagtagagtaggttagtggtggcagaggagagaaaagagagggaggtgaatgtggttataaaaggacaacacaggggaatacttgtaatggaaatgctttgtctttttttttttttttttttttttggcgacagagtcttgctctgttgcccaggctggagtgcagtggcatgatcttttctcactgcaacctctgcctcctgggttcaagtgatacttgtgtctcagtctcccatgttcagagtgaaacaaaccagaggtaatgttcatccaaataatccaacacacatgacattaaaacatcaagatcaggtcggacgtggtggctcatgcctgtaatcccagcacttttgggaggccaaggtgggcagatcacttgaggtcaggagttcgagaccagccgggccaacatgatgaaaccccatcttgactaaaaatacaaaaattagccgggcatggtggtgtgcacctgtagtcccagctacttgggaggctgaggcaagagaactgcttgaacccgaggggcagaggttgcagtgagctgagagtgcgccattgcacttcagcctgtgtgacagagtaagactccatctccaaaaaaaaaaaaccaagatcaattaaaatacagcattactgggccgggtgtggtggctcacacctgtaatcccagcactttgggaggccgagatgggcagatcacgaggtcaggagatccagaccatcccggctaacacggtgaaaccccgtctctactaaaaaatacaaaaaattagccgggtatagtggtgggtgcctgtagtcccagctacttgggaggctgaagcaggagaatggtgtgaacccgggaggcagagctggcagtgagctgagatcgcgccactgcactccagcctgggcgacagagcaagactccgtctcgggggaaaaaaaaaaataaataaatagaatgctgtagtgtccttgagtttacatgcccctccttacgcttgtgtgcccgtgcagattgcttgattacacaattagaggaggctggcggaggattgttttaatttttttttttttgagacagtctggctctgttccccaggctagagtgcaatggcgcaatcttggtgcactgcaacctctgcctcctgggttcaagcagttcttctgccgcagcctcccgagtagctgggattataggcgcccgccaccacgcccaactattttttgtatttttagtagagcagcgtttcaccatgctggccaggctggtctcgaactcctgacctcagatgatctgctgccccagcctcccaaagtgctgggattacaggcgtgagccacacctggccgtttgttttaattttgaaggtgaagtgaaagtgactacatttaccaaaagtgattgaaaagccaggactgttcttaccctgtttttccagttcttgctcagagcaaggtggtttctttttcacttaatcaccatacttacttttcatgtagaacaagtcagtttgagttatcagttcatcatcttaactaaattccatgggggaaggaattagttttagtttcttaaacttccaggtttgcttattggacaaaatgagatagcaaggcagtgtttttaagttagattttttatttctttggtaatacaattttctcagaaacttagtagtcttttagtttagttgtttttagttggtcctatgttttggatcacccctctctactttattttgatagtgccaactgtgaagacatctgaagccataggtttggatgggaaggaggcatctttagcctgatcatcttcgccaggctgtttatctccttttgcttggctgagaagtcttaataggaggcttattcccagctatttggggacatagaagcagttagccattgcttatattttactgaggtctgtgtggtatgttgattgtagtcagttaacgattttgagaactgaaggcagcctggtatatatagagtaggtattagactgtgtttcttctaattgaatttcccatctcttgtaatctatgccatcatcttctgtactgctgagaaagaaagaaagtttctaatcaaactataccactggttgtaagatgcagtttggctttagtgatgttaacacatgattcaaacgtgaaattgattgagtattggtgaaatacagaggagatttaaagccagaagacctgggtttaaatgctggctgtatgacttcatatctgtgtgatcttgggcatgtcatggttggcacttcaatttcttctctctataatgggggaagtgaggccagtcatggtggctcatacctataatcccagtgctttgggaggccaagatgggaagatcgcttgaggccaggagtttgagcaattgggcaacatcgtgaggccccgtctctacaaaatattttgaaaaaattagccaggcccagtggtgcgtgcctgtggtccgcgccactcaggaggctgagacgggaggatcctttcagcctaggagtttaaggctaaagtgagccatgattgtgctatcgtactccagcctgggcagcagagcaagatcctgactctaaaaaaaagtaaaataaagtaaaatgggggaaatgaactgctttagtaacatcatctgttttttctgtgagcagcgtagcttgacagccattggtgaactcgtgccctgtgcttccctgtccagatccccattctgcccgcaacatggagtataacggtttattcatagtagtcgagaaacactcactgaatgaatgaatgaggtgtagaactaagtggagtgggtaattcaacacatattaatttccttcttttttttatttttagaaagaaagaactttcagctaccaagaaagaccgtgtgaatcattgtctgacaatatgtgaaaacatagtggcacagtctgtcaggtaattgcactttgaactgtctagagaaaataagaactttgtatattttcagtcttaatgggctagaatattctttgtgtcccagctattttaaatggattcagaaatccatttaagatgaagaaggacccttttcccatatttctggctatatacaaggatatccagacactgaaatgaataatgttccctttttgtaatcttttatgcaaaaattaaaaccattatggtaattgaacaacatgtttatgtttagttaacacccttagcaactatagttattttaaaaccatctatggtttgatatttttgcatttgttgcaatagtaggaacagcacaagacagttcagtttgtctctcttatttgctttttcttggcagtttgctgtcctattgtacctctgctcctagcagtggctggagcccactcctctgtgcttcgggattagtggggatcgtggggcattgactgtaggtcagctttccttgcttgatctttctcactgggatgaactagcagcaccttcttttgtagctgctttgcttttgactatctttctgaccgttgttcctagtagctgtagatggtaaatatatttaggcctgtttccaatggctcagtaggagacatattcacctatgatatctgaattctgttacccacatgggcatgcgtgaaatagttgccttgccttactttcccttggaataaataattcatgttattctcctggtagaagctagaaaaagcctttatagtcagtcagaaaaaaatttttagacaaataatcttgattttagtactgacaaaaacgtgtggtgattctttttttaatttttttttgagacggagtttcactcttgttgcccaggctggagtgcaatggcgtgatctcggctcactgcaacctctgcctcctgggttcaagtgattctcctgcctcagcctcccaagtagctggagttacaggcatgtgctactgtgcccagctaattttgtatttttagtagagatgttggtcaggctgatctcgaactcccaaccttaggtgatctgcccgcctcagcctcccaaagtgctgggattacaggcgtgagccagggcgcccggtgattcatttgttttttcaaaaaatttcctcttggccattgcttttcacttttgttttttttttttttttgagacggagtcacgatctgtcacccaggctggagtgcagtggcatgatcttggcttactgcaagctctgcctcccaggttcacgccattctcctgcttcagcctggcgagtagctgggactacaggtgctcgccaccacacccggctaattttttgtatttttagtagagatggggtttcaccgtggtcttgatctcctgacctcatgacccgctcaactcagcctcccaaagtgctgggattacaggcgtgagccaccgcgcccggccctctcttgtctttttattgtggtaaaatgcacataaaattgactgtcttaaccatttttaggggtacagttcagtatatatattcgtaatgttgtacagccatcactgccatctacttcataagtttttcttctgtcaaaactgaacatctgtcttcattaaactccctatcatccattctttcctgtagtccctttctactttctgtctgtatgagtgtaactgctctggagacctcatgtaagtggattcctacaggatttgtgttttttttttggtgatctgcttatttttaatgcctctgtgcatttgtattatatactttcaaagtgatttcacaaaaccgtttcattttaggttaactcatttctgttgtttgtgaaatactgtgtatgattctgttctgtttctgtctaatttgtggaaatgttgtgggaagaaaatgaaataacaaatgagcatatgtcctgaaaataaaaatataaaaattctaagttagcatgctattgtagaatacaacgctatgataaaagtaggaaaaaaaaaggtttgaattctatctctgctacctgtgtaagctgggtgactttagataagctgtaacgtgtttgagccttactggctcatttttgaaatgtaatccctagttacacagttcttgtgggatcagatggtacatgtgaaacactgtgaaaaagcaactgcatagatatgttcattagccacctgagcgggaagcgtatcccattgcgatgcccatcatccaaagctatatgttatctttacttttttttttttgagacagagtcttgctctgttgcccaggctagagtgcagtggtgcaatctcagctcactgcaagctccacctcccgggttcacgctattctcctgccccagcctcccaagtagctgggactacaggcacccgccaccatgcctggctaaatttttgtatttttagtagagatggggtttcaccgtgttagccaggatggtcttgatctcctgacctcgtgatccgcccgcctcggcctcccaaagtgctgggattacaggcgtgagccactgcccctggccatctttactttttttgtgaaatgactttaaatacttggcaaacatttggtcattgttcatctgatctccaccatccaggtctcagagaacataatttctctctgaaagcttattgacccaggaaataagatctctttcaatctgagtgcgtcaggctttattcttgtcattttgtcttttgataattttcaaatggaattcatggaatgttggcttatattcatatattagtaaagtatgttgagacatcttaagattgatttgtggttctatatgccatattaaatcaaaataatagctgttaatggttttcacattagtctgtctcttgtttttatggagtaatgctgagagttcattatgcttgttctacagaagagcatgttaaaaggagtttttggagtcagagaggttattcttggtttcataggatacactctatactttttagggatttcagagtatatagctgaaggtgatattttatgtaaatatgttttatggaaacttattgctcatcgctgtttcctgttaactctcctaaaatataattaaacttttggaacttttttatagcttttgtgctagactaatttttgtctctaatgaggttatataaatggcagcttctgacgttttcaatgtaggaagtcatttaaaacttcatgtatattgtgaaaatgtagtctgctttaagctctctaaagtggtctaagttactggttcctaagtatggatgagcatcaaaatcatctggaaaatttgttaaaaatacagtaatgaaggcacctcactgtcctttttcccaaacatacttctgcattctgtttgagtaggtagggactacacatttttcacaagtatcctcttgggaatacccaggaatgcttacttgagcaacctcttactaatatgtaccttgataaggtggctaggtaaacataaatatacaaaaatccatagatctcccatatattagcataaatcagctagaaaatataacgtttaaagatctagttcacagtagcaccaatatatcgaactctaaggaatcgataaatatgcaaaaactttataaaaacttctgttaatgtttctgaaagatataggtgaccactttctagataggaagattttatattactaagttgaattttctctaaattaacacagaaatttaaaataatcttgatcaaaattctagtagaggtatttttgaacttgttcactgcaagaataaatacataattgcaaagaatatctcaaaatcatcaccaggcctggtgtggtggcccatgcctgtaatcccagcactttgggaggctgaggcaggcagatcacctgaggtcaagagtttgagaccagctggaccagtgcggtgaaacactgcctctactaaaaatacaaaaattagctgggtgtggtggtgcatgcctgtagtcccagctacttgggaggctgaggcaggagaattgcttgaacccaggaggtacaggttgcggtgagcctagatcgcaccactgcattccagcctgggcgacaagagcaaaattctgtctcaagaaaaaagagaaaaaagaaaaagaaatcaacactaatatggtgagacttaatgtatgtgacattaaaatagtgattggatgttaaaacaggtatagaacagaaagaagagtgtatgtgtgtatctgtatgaatttatgatgggtgtaacatatatgtattagggaaatgagggaaatgatacatttctctgactttgggagaacattatatctctacctcatattgcaaacaaacataaagttcagattaattacctaaatgtgaaaaaatgaaataatttctttaaaaaatgtaatcttagtttgaggaaggttaacattataaaggaaaaaactgttttgagtggaatatagttcaatatgtcaaaatccaccttcaacaaaattgaaagtaaattgaacttggggaaagtattgacagcatatagatcaaaggttactagcctgtgtaaagagcagttataaatatcgttaagaaaaacactgtcgacctgtcggcaccttgttctccgactcccagcctccagaactgtgacgagtaagtgcttattgtttaaaccacccagtctgtatgtggtattttgttatagaaactcaagctgattaggacactagtaatcagtagactgaaactgaaacaaaaataagaaccttttttacctgtcaaattggcaaacattaagaatattcagatttttgtcagaggtgatacaaccttctaagaaggcaatttgggaaaatataaagctttagattattatatgtctgacctagcagttttacctctagggtgcttacccctaggaaagtgtgtaatgatattggtgcagtgcccttcatcccattagaaaattaaaaataaccttaatggcctaccactaaaaggggattgaaaatttaagatatatttatttatgtgtttattgagatggagtcttgcactgtccgcctgggccagagtgcaatggtgcgatctcggctcactgcaacctctgcttcccgggttcatgtgattctcctgcctcagcctcctgagtagctgggattacaggctcacaccaccgcacccggctaattttttgtatttttagtagagatggggtttcactgtgttggccagactggtctcgaactcctgacctcatgatccgcgcccctcggcctcccagtgttgggattacaggtgtgagccactgcgcctggccagatacatttatacaagagaatgttagttaacattcatagatatttatattttgtttactttttattaaaaaaattttttttagagacaggatcttactctgtcacccaggcaggatgcagttgcacaatcatagcccactgcagcctgaactcctgggcttaagtgatccttctgcctcagccttttgagtacctgggggactttaggcagtgctactatacctggctaatttttaaatgttttatagatgagatcttgctgtattgcccaggctggtctagaattcctgggcccaagtgatcctcccaccttggcctcccaaagcgctgagattacaggcatgagccaccacttctgaccaatagatatttatatttgtgactggaaaatatattaacaatgtgttaaaaaattcagttaaaaaataatgaaagatttttgcttctggctaagatagaataacaaggacagcatttatcttcttgccttgaaatagttgaaaacggaagaaatatatgtaacagtggttttcaagttattgggcatcaggcaaagaagaatagttatcccaggaaaatgaatgtggagagccctacaatttccttacattactgcctggtcatggcaagaggaaaaactgagaggagactgaggctgagccagtggtttgctgggttgaggaggcagagctgggagtgcagagatgcaaggtggtgagagcccatatggaagaataccagggaagagagctgcagagggagctccggagacctgcaccctgccctctcagtaccctgtcatgtgtgtagctgagtactgacgagcacttgcttgtgcggaaatgacccagggctggaggtagagccacctgaaaggattagaaggaacagttgctgaaagtcacacagggccaggaagaatttctaatcacaccagttggagtggaaaacctcagctctcatagagcaggtagggtactcagaagggtttgcccacctagccccagactaagtttcgttactctgaccctacctaatattaaaaagagattaattaaattgttcgcaacaaaaataatatatttcagtgtttgtaacacgtagaagtgaattgtatgacaatagcataaaggctggaagagcagaaattgacatgtatttgcgctgggcagaataatgctcccctctttccccaaaagatatcaagtcctaatccctggagcctgtaaatattactttatatggaaaattgttttatgatgtgattaaattcaggatcttgagatgagggggctatcttggatgatctgggtaggcactaaatgcaatcacatatatataaaaaggaggcagagggagattttacacacagagagaaggccctgtgaagatggaacagaaagatttgaaggtgctggccttgaaaattggagtgatgaagctataagccaaggaatgcagcagccaccaaagctggaagaggcacggagcagttctcatttagagcctactccagagggaatgtggtgctgccaattccttttttttttttttttttaagatatcatttacccctttaagttggttttttttttttttttttttttttagtatttattgatcattcttgggtgtttcttggagagggggatttggcagggtcataggacaatagtggagggaaggtcagcagataaacatgtaaacaaaggtctctggttttcctaggcagagggccctgccacgttctgcagtgtttgtgtccctgggtacttgagattagggagtggtgatgactcttaacgagtatgctgccttcaagcatctgtttaacaaagcacatcttgcaccgcccttaatccatttaacccttagtggacacagcacatgtttcagagagcacggggttgggggtaaggttatagattaacagcatcccaaggcagaagaatttttcttagtacagaacaaaatggagtgtcctatgtctacttctttctacgcagacacagtaacaatctgatctctctttcttttcccacatttcctccttttctattcgacaaaactgccaccgtcatcatggactgttctcaatgagctattgggtacacctcccagatggggtggcggccgggcagaggggctcctcacttcccagatggggcggccgggcagaggcgccccccaacctcccagacggggcggcggctgggcgggggctgccccccacctcccggacggggcgggtggccgggcgggggctgcccaccacctcccggacggggcggctggccgggcgggggctgccccccacctcccggacggggcgggtggccgggcgggggctgccccccacctcccggacggggcggctggccgggcgggggctgccccccacctcccggacggagcggctgccgggcggaggggctcctcacttcccggacggggcggctgctgggcggaggggctcctcacttctcagacggggcggctggtcagagacgctcctcacctcccagacggggtggcagtggggcagagacattcttaagttcccagacggagtcacggccgggcagaggtgctcttcacatctcagacggggcggcggggcagaggtgctccccacttcccagacgatgggcggccgggcagagatgctcctcacttcctagatgggatgacagccgggaagaggcgctcctcacttcccagactgggcagccaggcagaggggctcctcacatcccagacgatgggcggccaggcagaaacgctcctcacttcctagacggggtggcggctgggcagaggccgcaatcttggcactttgggaggccaaggcaggcggctgggaggtgaaggttgtagtgacccgagatcacgccactgcactccagcctgggcaacactgagcactgagtgagcgagactccgtctgcaatcccggcacctcgggaggccgaggctggcagatcacttgcagtcaggagctggagaccagcccggccaacacggcgaaaccccgtctccaccaaaaaacacgaaaaccagtcagacatggcggtgcgtgcctgcaatcccaggcacttggcaggctgaggcaggagaatcaggtagggaggttgcagtgagtagagatggtggcagtacagtccagccttggctcggcatcagagggagactgtgcgagggcgagggcgagggcgagggaattccttaatttcagtttagtgatactaattttggactctggcctctaaaactgtgaaagaaaaaattttttgtttgtttgtttcttttaagccacatagtttgtggtaatttgttacagcagctgcaggaaactaatttatgctgcatgtgaaatggtgtaataaggtagattgtgatgaagatacatagtataaacaattaagcaacaactaaaagcacaacaaggaattatagctaatgaaccaaaaaaggagattagaataataaaaatggtgaatcccaaagaagccagaaataggggaagaggcaaataaaggaaagaaagagcttgatggtagatttcaacctaactatgtcaaaaaggacattacatgtaaaaggcagcgatttttcagattgaatggaaaagtaagactcggtatatgctgctgcctgcaagaaacacattctaaatataaaggcaaaaataacctacaggtaacagaacggaaagaagttcactgtgcttacaagaattagatgcaagctagactggttctgttaatatcagacaaagtggatttcaaagcaaaggctcttgcccaggatgagatggtcatttcataatgatgaaggggattcgttcatcagcctggcatagcaagctgaaatgtttatgcaccggactacagagctaaaatacatgaagcaaagcctgacagaactacaagtagaaacagacaaatccacagtgatagagatttcagtagccgctctcaatgatttgtagaacacgtagccataatatctggatctagaacacttgaccaacactgtcccctgtgcaacctcattggcatttacaggacactccacccagcaccagcagaagagacactctctcaagtgctcacagaatgtttgccaagatagagcagatgctgggccataaaacaagtctctaaattaaaagcattcaaattattcagagtatgttttctgacctcagtatcattaagttggaatatattataggaagataacctggaaaagcctcagatatgtggaaaaacccatttccacatggcccatgggtcagaagtgaagtcaaaagggaaatttgaaagtcttttggattgactgatataaaaacaatagatttctaaacttgtggggtgctgttacagcatagtaaatggaaatttctagcattaaatgcctgttttaggaaagaaagatttcaaatcaatgacctcagcttctacctttggaaacttgaaaatgacaagcaaatggaatccagagttaccagaagggccaggtacggtggcttatgcctgcagttctgccactttgggaggccgaggcaggtggattgtttgagactggcagttgaagaccagcctgggcagcctagggagaccccatatctacaaaaaacaaaaaaattagccaggtgtggtggcatgtgcctgtagtcccagctaaccaggagtctaaggtgggaggattgcttgagtctgggaggttgaggctgcagtgaactgtgattgtgccactgtgttccatcctgggcaacagaatgagaccctgtctcaaaaacaaaaacagttactagaagaatggacatcataaagataggagcagaagtcagtaaaatagaaaacaaaaatacataggaaatcaataaaaccaaaagctggttcatcaagaacatcaataaattggtaaagctgataggaaaaacagtgaagtcacaaattagcaatatcaggaatgagggagatgacagtagtatagattatatagatattaaaaggactgtatgaggcaggtgtggtggttcacgcctgtaatcccagcaccttgggaggccgaggtggacagatcacctgaggtcaggagtttgggaccagcctggccaacatggtgaaactctgtctctactaaaaatacaaaaattagttggtcgtggtgctgtgtgcctgtaatcccagctacttgggaggctgaggcaggagaattgcttgaacctgggaggcggaggttgcagtgagctgagattgtgccgttgcactccagcctgggtgacagagcaagactccatctcaaaacaaataaataaataaaaaggactatatggtaatattatgaacaactttatgccaataaatttgacaacttatagatgaaatggatgagttccttgaaagacacagaaactattaaagctctctcaagaagatatagataagctgattagccctatatctattttattgaatttaaatgtaaaaatcaatatttagttactggaaaacttttaagtgtggttggaaatggtatacgaactttttcaactgaattttatgaagtctaatcacaggtaaaggttttctgatgaaaatttagtgtctgaattgagatatactgtaaaaaatgttatatatcttaattatttcttcacattaattacatgttgaaataatactttgggtgtattgggttaaattaaatattatgaaaatcttgcctgttttctttttacttttgatgcgtcagctaggaaatataaaagtgtagctcacattctgtttctgttgacagtactgctttggagcacagtgtttgaatgatctatcatttcaaagacctttcctcagttcgttattcatggctgtctgtattccacatagataaggtctgaaatactgctaagtggcatgttttgttttatgcttttataagtttgttgatcattactgatgtggacttttggtgcctcttaggctcattgctatcttccaaccattgtttgcaatttttacctagagataaagagaaagagacatttggtttcagagtagttagattgggatcatgaaagagcaacctcattttgatgcttcaaaaatagcacatcccccgtattactgggatttgctattcttgggattacttcaagaacatccttgtgttactggtttggatgcttctgaatgctgtgaagtcagtttcatgtacatggctcatcagtttagctctctcttggctttgtttagacagttggagcatgatggcctaaacagcttctttcaattaaacattttaaaatagtttacaaatagtaaacaaactccagtttttgtgactctttgtctcgcacaacaaaaacacaatctgaccatgatcatctggcatcttagggtgaaatatggttatactttggcccataccgaaagcaagattaaaaaggggcaggagagatagactgctgaactgattttcaaggttccaagaatattgtaggttaagagtaaaagtaaacttttggtagaaagcagtgggttgtctaggattgaagtatctgaagtttttaaacgaaaatttaaaaagaaaaatgagaattgccttacaagtacaatctcttcttttttaaaaaataaactttattttgaaatagttttagatttatagaaaaaaattagatagggtaggaagttttcatataccctacatccagttaccccagttattatcatcctaatttagtgtgagacattttcatgtttaatgaatcaatattgatatgctattaacttaagtccagactttattcagattttcttaatttctatgtaatgtcctttttctgttccagaattccatgcaggacaccggatacctcattacatttcattgtcatgtcaccttaggctcctcttgacagtttctcttctttttttgcttagaaattctccagaatttcagaaacttctgggcatcgctatggaactttttctgctgtgcagtgatgacgcagagtcagatgtcaggatggtggctgacgaatgcctcaacaaagttatcaaagtaagaaccgtgtggatgatgttctcctcagagctatcattgttgtaggctgagagaagaagcgatcattgagtgttcttctgttttgagtccctgaggatgtctgcacttttttcctttctgatgtatggtttggaggtgctctgttgtatggtttggaggtgctctgttgtatggtttggaggtgctctattgtatggtttggaggtgctctgttgtatggtttggaggtgctcttgtatggtttggaggtgctcttgtatggtttggaggtgctctgttgtatggtttggaggtggtcttgtatggtttgcaggtgctctattgcatggtttgcaggtgctctattgtatggtttggaagtgctcttgtatggtttggaggtgctcttgtatggtttggagatgctctattgtatggtttgcaggtgctctattgtatggtttggaagtgctcttgtatggtttggaggtgctcttgtatggtttggaggtgctctgttgtatggtttggaggtgctctgttgtatggtttggaggtgctcttgtatggtttggaggtgctctattgtatggtttggagatgctctggtatctgcctgcattgcttgccacacctgcccggtcagaaggcgctatgttgacaattgtgcctgcacggtgcctaggtcaatgaagggaaccgatggtagccactggatgctcctgggaaaatgtcactacaggcaccagagaagccagagctatgcccaaatttctatgagtctcagttttcttaaccataaaatgggatcaatgtttttgtggcatgtgtatgagtgtgtgtctgtgtatgtgtgaggattaaattgtgtatgtgtgaggactaattgccactactggatcctcaaagtggtaagaagtgttcttattaataatgacatccttacactcttacccagcaagattgatgggtgtggcactgcttctctttttccatcacatggtttccatggtatccttttgcccagggaatctttgctttgtggctagcactttgttgtttggctaatcacgctttctgtggtcaggacgctggcttctctggagccatgggattctagctccctgtcttgtccctagagtggtcactgtcttctctctccgcttgcaattcctgctttgctcgcatctcacttatgcagtgacgtatatcagtttcaccttgttctccgtgcctgctgatcattggcaccacttgcatggtgccatttagggcctgcttccagttaagcttgcttctccacaggcctaaatatccttgcttgcttcttttattctcactggcaggaccagggcggtctgtctttgcatgagacagggtctcgctcagtcacccaggctggagtgcagtggctgatcacggctcattgcagccttgagctaccgggctcaagctatcctcctggcttggccccttgagtagctgggactacaggcgtgcaccaccatgcccagctaatttttaaaattatttgtagagatgggatctcgccaggttgcccaggctggtcttgaacgcctgggctcaagtgatcctccctccttggtttcccaaagtgctgggatcacaggtgtgagccactgtgcctggcccttgatgtttcagttcttgatatttgatcctcagagtcagaaaatctaaaaagagggctatcccaggttgccttggttcatggcaaatgggacgttaagagggcagagagaatatgaacagaaactgttctaatattggtcatttaatgtgtaagtattgttcttttttaaacctccttcattttttttccaggaattgctggacacagtggcttggtgtgtgtctgaggactgtaggccatggccctaggttgtggttttaggtctcaggtgctcttcctggctgtctccttgcttctttcccatgtcctcttctttgtttccagccatttctcccttatgcttaagtttggtgcagcagggtttggctgctctcagattcctgcttcctcagatgctgtagttgtcaggcccagcgggctggcagcgggatcaggatctggctaggtttgctctcactgtggcagagtagggggaggcgtgggagagcacgtgtgaccccaggccagctgtagggagcataggcatggtcacgtagccttcaggtcctagactttgtcttctcatgagtatggctgtgtgtgtatggtgaaaactaggttctacttagcccaagaaaatgggcacattttgcatgtggtttctgtagagaaatgcactgggtatctgacatagcctggcagcatgcctccctcaggtaggttagtctcaggcggtgaagcacgtgtgtccagcaagaacttcatatgtggcataaagtctccgttctgtgaggtgctggcaaatcaccaccaccgtcaagaggctgaagtgatttttgtctagggaggcaggaaaggcttcctggagtcagcagccagtaggtgaaagagtagattggagaccttcttaatcatcaccgcctcttgtctcaaggggtgccaggaagctgtggaggctgaacccatcttatgctgccagagagtgggacaccatgagggtcaggtcaaggggttgtaccttgtttggtagagaattaggggctcttgaagactttggatgtggtcaggggagtgtatcatttaggaagagtgacccggtgaggacgtggggtagaggaggacaggtgggagggagtccaggtgggagtgagtagacccagcaggagtgcagggcctcgagccaggatggtggcagggctgtgaggagaggcagccacctgtgtgtctgcggaagcaggggcaagagggaagaggccagcagcgtgctgccatcacccagcgactggcgtagattgtgagagaccattccctgctcttaggaggggctgagttttagttttctcttgttatacaataagcttggtatttgtttacaaaacatttgtaaagctaaatcaaggtttgataaggcttctagttttatttaagaagtaatgttgaaataaatgtttgtccaattcgctttgctcatttaaggactttcagtacaaactgcaacaacaggattaggatttaaacgtttctgagatgtttttactcctcagaatttcccagaatgtgatctggttttgattttcaagcttgctgacccaataggttaacccacaagttttacgaagaccatctcagtccacttacatcaactgcccatgccacggttaaagagatcatcgactgatgtttggcacagcttcctccctcttgggtgggcaagcatttggaagagaaggctcctatgggtgagagtggggcaccaaagtcttccctgtcccatcccctagcttgagaagcccttctctaatgtggactttgtgccgttagcatcgttactagcttgaagttgaccatctggacgtactttctggtttagcctcacaagtgagcaaggagggttgagagatgtgctgtgaggaatgtggggccccagctggcagcaggctctgggtcaggggggcagggaccacgggcatacctgacagtgaggaggggccacacctgcagaaaaggatgcaggactccgccttgggaagtgttctaggccagagcgagggtctgtggtttataagtacacccacagtgctcgggaccctgcagatgtccagggtgccgtctgagcccgtatcatccaacagaatgttctgctagtgaagattaaagatttactccaggggctttaggatttattatatatatataaatcctatatatataattttttttttttttttttttgagatggagtttcgctcttgttgcccaggctggagtgcaatggcgtgatcttggctcactgcaacctccgcctcccgggttcaaactattctcctgcctcagcctctcgagtagctgggattacaggcgcccaccaccacacccggctaatttttgtattttttagtagagacggagtttctccatgttggtcaggctggtcttgaactcctgacctcaggtgatctgcccgccttggcctcccaaagtgctgggattacaggcatgagccaccccacctggccaggatttattgtatttgaaccatctaccattttaattttgatgttatgtagtatttgatgataatgaaagttaaattgtttttctttccatttttctgtttaagtgaatgacctgtatctagtttattcagtaacttcctgcatatatttgtttctttcattcttaatgaatatattcttaatttagttgctattatgttttgctttgccccaaaattgaaatcttagtttccttttagctcgttttagaactagtgatgggatgtgtcttccataaatctcttgtgatttgttgtaggctttgatggattctaatcttccaaggttacagctcgagctctataaggaaattaaaaaggtgggccttgcttttcttttttaaaaatgttttaaattttaaatttttataggtacacgtattttgtaggtacatgtaaatgtatatatttatggggtacatgagatattttgatacaggtatacaatacataataatcacaccatggaaagttggatatccatgccctcaagcatttatcctttgtgttacaaacaatccagttacatgctttacttattttattttatttttgagacagagtcttgctttcacccatgctagagtacagtggcatgaccttggctcactgcaacctccgcctcccgggttcaaccgaactttgggctggtctcgaactcctgacctcaggtgatccgcccgcctcggcctcccaaagtgttgggattacaggcgtgagccactgtgccgggcctgattgtacattttaaaataactaaaacagtcagggcacagtggctcatgcctgtaatcccagcattttgggaggctgaggcaggtgatcacctgagatcaggagttcgagaccagcctggccaacatggagaaaccctgtctctactaaaaatacaaaaattagccaagtgtggtggcgggcgcctgtaatcctggctactcgggaggctgaggtaggggaatcgcttgaacctgggggtggaggttgcagtgagccgagatcacgccactgcattccagcctgagcgacagagtgagactttgtctcaaaaaataaaaatgaaataaaattgggccgggtgtggtggctcacaccttagtcccagcactttgggaacctgaggcaggtggatgcttgagaccaggagtttgagaccagcatgggcaacatggcaaaacgctgtctgtacagaaattagctgggtgtggtggtgcacaactatagtctcagctacttgggagattgaggtgggaggattaattgagcctggaaggttgaatctataggtagctgagattgtgccactgcccttcagcctgggcgaccaagtgagaccctgtctcaaaagaaaaacaaaaaaacaaaaaacaaaccactattatcgactatatattattgtctatgatccctctgctgtgctgtcgaataccaggtcttgggcccttatttccatcactgagcaaacttcactctgttaagcagcaggtgtgggatttcatcgttattcagtaattcacaatgttagaaggaaatgctgtttggtagacgattgctttacttttcttcaaaaggttactctttattagatgagatgagaattaaaaatggtaacttactttatatctttataattgaagcccactagaccttaaagtagttaccagatgttttatgcatttaaatggccttttctctaaaattagaaagtaacaaggaaagaaaatgcttcgtttctatgcaaccctcttggtgactagtatgtgactcttaatgcaaccctcattgcaccccctcagaatggtgcccctcggagtttgcgtgctgccctgtggaggtttgctgagctggctcacctggttcggcctcagaaatgcaggtaagttgtacactctggatgttggtttttgtcgggggccagctgctactgatcctttatgtctcagctcagatgtcatttcaaaagtctgctctgccctctccaaattgcagtcgaccttgccctgtttatgtttccctcatagcactaatccatgtcagaaattgtcacgtacagtctatctgtgtgcttgtttattttctatcccacccttccgcaagagacttatgggatgtgtgccccaggacagcaggggtcttactgtcttatgctctgttgcagcccagcagcgataacagtgtctgcacatagtacttgcttaaaagatacttgccaaattgttgaaggttgaggtaccaatttcattattgctgactataggagttatagcaaaatatccatttgtctgttacatgagttaaaaatatggttgttgcactgtgaatagtttggtttagtcaaaacagttgtatcttaacggattgagaaacaaaagcaggaccacttttcatcagctccctccttctccttaaccagcaatacatgctgatgctgatatcccatagaccctcagctccatcctgagtcactgggaatgtggtctaaaccctcactattaatatgaactgagtttcaataagaatcttatatgggtcgggcatagtggctcatacctttgatcccagcacttcaggaggccaaggcaggtggattgcttgacccagactaggcaacatggtgaaacgccgcctctacaaaaaatacaaaacttagccaggcatggtggtgcgtgcctgtggtcacagccactcgagaggctgaggtgggaggatcacttgagcctgggaggtggaggtcgtgttgagccaagatcgcaccactgcactccagcctgggcaacagagtgagacctgtctcaaaaaaaccaaaatccagaaaagaacttatatggctgcagaggtataatcactaaggaaatttccttttgtataatcttttttcttttactatcatttaaaaaaatgtgttatatttctgaagcaacacatccaggttctgcacatagcagccaaagtgaccttaaagaatataactgggtcttgtcattcccttatttaaactcttgtacccatttcccagtgccgtttagatagagattccagactcgtcaatggctctgtcacctcagacaccctgcattgactcattagtctgattagagtcaggtttttcttcctcctgatggtttttttttcccccttagttctcagcggaacagtcacttccttagggaggtttccccagccaccctctgaggccgtgcttgttgccagactctgccactagagggcagggctgcaccactcctggcacctcgcacccggcctgccctgtcactctgtgtgttgggtgaattcctgtgatctgtgactcactgctctgtgtcctacacattcggcttttcttctctccccacaaccccattttataattctcctttttcaggaaagctttattcccatttaaaaatttttgtttttaaaatggtattttcttacacttattttctaattaaaaatgagtgttttaagaagtattatgatttactgcaaataatttttaaacccagccttttagatcctctgtgatcataagagaaatgaaggatgtctcccaacacttgagcttcatccacatttcatcctcctgttctttcagctgagttttccccatcccattagggactgttggaatataaaactggcttttccctaacagggaatgaattgcttctgtttctcctgaaggagagctggaagaatgacttgcgttcttttgcatacacaggccttacctggtgaaccttctgccgtgcctgactcgaacaagcaagagacccgaagaatcagtccaggagaccttggctgcagctgttcccaaaattatggcttcttttggcaattttgcaaatgacaatgaaattaaggtatgattgttgcctcaggtcacaaacatgcgagtgatgctgtgagtgagtctgtggagggtgagggcttctgaacagggagtcctgtgggagtgcttcttggggtatgttgtatgtcgtaatttagactaccatcatttgtgttatttttgaggcacctaaggacttctttccacttctcatttcttactgtggggtgaagagttgaattgggagatggtttctagatgcaaattgaaaaggcatttttccagagcagatttgttttcggcgtactagagtgactctttaacctagctgcgggaagatgactgtgccaagactgcaggtaggagaaagctcactgacgaggccttgtgggtctgaacgtcctgcagctatcagagcctgttggcttcctgttgtgcattccaacaaatcatcttcaaacccactttagtgttttgtttataatgtccagaaatagtgaccctgtcacatgctctacagattacaggattcttagcctcttcctttttggtaggtcagtcctgggtttgagcccaagtgaccctcctgggaggtgatgatacacactgggtagagtggaatcagatggacttggattagaattctgtcctctttactagttattttcctctaggcaaactgcccaacagctctaagctatttccttcgtattctgaaaaataagccttaatgggacccatatagggcaactctgagagtaaaataaaggaatatgtgttagagtgtagcatagtcacccacgggaagggcttagatgttagctgctactgctcttattagctgaatgatttggaataaactgttagcctctctcatgttttttctcttgagcttcgaagttttcttgttaatactaaggagatattcaaactagtcatggggttttggaatgacgaagggagatgatgaatctaaagaatttagtgtaatatttcttcatgctcagtaaatggtagtttctgctgctgttatttttattaccatctctttggaatgggagtaggtgctcctttgtggtcagaggctgtgagagctccacagcgccagtttgcccatctgtacactggggtctgttgaaggcagtcccctctgtgatatctctggctgtcagagctcagatgatagatggtatttttgtactcttagttctcatcattttcatgatttcgatcaccatttgagtatgatgatgctaacactttgttgaacgtagaatccgttaattacttccttcctgaacctttggcattaaaaaaaatctattctgctacctctctgctcatttatggttattcaaatttattatcaagagcctggtacagtggcttgtgcctataattgtagctacttgggaggctgaggtaggaggattgcttgaggccaggagtttgagaccagcctgggcaagatagtgagaccctatctctaaaaaaactgaaaaaaaattagctggacatgatggcatgtgcctgtggtcctagctactcaggaggctgagacaggaggctcggttgagcccaggagttggagttcgaggctacactgagctgtgattgtgccaccacactccagcatgggtggtaaaacaagatgccatttcttaaaaaaaaaaaatatatatatatatattatcaatgaaattcagtagtaccaacaggattataaacaaagatagtagttcccttcctactttttctcttaatccttgtgtctcacaggcaaacataactcttagtatttcttccaatatttactttcatgtttctttctttctttctttttttttctttgagatggagttttgctcttgttgccaaggctggagtgcaatgacgcaatcttggctcaccacaacctctgtctcccgggttcaagcgattctcctgcctcagcctcctagtagctgggattacaggcatgcatcaccacgctcggctaattttgtacttttagtagagatggggtttctccgggttggtcaggctggtctcgaactcctgacctcaggtgatcctcccacctcagcctcccaaagtgctgggattacaggcgtgagccactgcgcccagcaacttccacatttctaaataacatgcttctactgctattttttttttcaattttagacatttttttactttcactatagttctatcagaattcagtgtgtacgttattatgcctaagtaaatagtcatggttgcttacgtattatatttctttgattgtgtttcttatttgatgagaaagctgtgttttttgctctgggttgaaactggagagaggacctggggaggaggaggaggacagatgaagttggtgactgtaccttcatggccatagctgggttctcagcacccggggatctgctgatcacctactcataggccaggcccctatcgaagttctaggtgacccagtgctggggacgggggggccacctgcaaggtctaatcatggaggtgggggctacagtgttggcttgtgctggggccagcatccttaggaaggcatcttggaggtggaggagacagccgcccacttcttgattggggccttcagcagcaccagcttcttgggcaggctggtgctggctttcatcaccatgtcgtgttcaatcttcttccagatcctgacttctaggttcagctttcctcagaccctggttcctttcagaggccattgctgctgccttgctctttgctggcttgtgccttgattatatgtctttgtacaactttttgttttcctggagttaatcttcacatctgttttcttggagttaatcgttacctctatatcgcttgcttattattctttggcctttttgtcttctcacaccttccaacttctttgtaatatgtgtttagtacaatttttcatgacaggtagtttactgaatcagtttttccccagtgtggtcatccaacttgagttatccagctctctgccccagtctgggcaggttgatcttcaggtctgtagtacacttgtatcctaggacttctctttgccattagcctggaatttcctttgcagttctcccgttggatgcccagttcctagatgccatatgtttttctatcgtctagtagcttcctgagagaagatgaatgggagggaaattgtatgaggttttgcattcataaaaatgccattttttttcctgtacacttggctgggtatggtgttctggggtagaaatcattttccctcagaaatgcaaagtctttgccctgttgtcttaaaatctccaacgtgacccgattccttaacctatgaatgtacttttctttggaagctttccatttttggggaggtgaagtgctaggtacttagtaggccttttaatttggaaacttacatcccttcagttctgggaaaattttcttaacatttctctgagaagttcttgccttttattttctgtgttctctcctgaaattggttagttggatgttggtcctcctagattgactcacatcttacctttttcttttctttttctggtactttttagatatccatctcaaactcttctattcattgttatgtttttaacttctttcttttctttgtctcttgatggggtcttgccctgttgcccaggttgtggtgcagtggtgcgatcatagctcactgcagcctcaaattcctgggctcaagcagctgttctgcctcaccctcccaagtagttgggactacaggtatgcaccaccacgtccagctattttctttacttttttttttttttttttgagatggagtcctactctgtcgcccaggctagagtgcggtggtgggattttggctcacttaagcctctgcctcccaggttcaagcagttctcctgcctcagcctctcaagtagctgggattacaggtgtgcaccaccatgcccggctaatttttgtatttttagtagagccagagtttcaccatgttggccaggctggtctcgaacgcctgacctcaggtgatccgcctgccttggcctccgaaagtgccgggattacaggcgtgagcccatcattagatctttaaataccagtatctataagtcttttcctcttgagtcagctagtatccctggaaggaaattactcattttcctgcttggaggctataagcttggctatgtttatcctgcaaccggggactggaagggaggggactgacagtgttgctggtcagggtgccctcttactttttgttttctgtgtgcatctcacgtctgtcctcagcctatgtaaacacctcttgagattatccctctcaatctttgccggaggtgggggaggggctgcttcctgggctgccttggattggagggaagacctcaggtgagtgggtgggaatttgcccaaggagccatgagaccagccactatttcaccctctccatccctccactttcagatgtatgtggcgcctccaaagcccgagctcttcttggcgtctgtggcttcaataagcttgctttttgctggtatccctcctaccctcccctgtccccagcaaagcttgcatttgaacttcttcctacgggctaacaaatcagtcagttatgtagctcttgttactttttagcttccgaagttttgttgacacccgtagtctgctaatgtccctgttctgttctttctgttcgtgtaaatatatgctttatacaacttctttacatgatttttgtggggtttctgggtagcagagcttcacaagttcaatccagcgtgttggattagaaatctcccaccctctggtttattcttattctcaaaattacctgccaaacactgatactcccttgtttttccttttcctgacaggaaatgtacataccatacaggacagaaatcattagtgtatcccttggtgaataaccacaaagtgaacttaacccttgtaaccgccacccaggtcaagacagaatattaccaagcactcagaagcctctcccctattcccccgtcactgctcctgccttcctccccaaggtcatgactgctggcttctaattccagagtctgtttttaaattctgtgtacatagaccatggattaagtgttctttttgtctggtttattttggtcgacattaagttcatgagagtcttctatattatcgtgtgtattagtattcctgtagttttaggagcttcatagcattccattgtagggatataccacagtttattcattgtattatcactgggttgtttctagttcttggctattgcgagcagtgctactgtgaccactcttaggtgtgtcttttggagtacatgtgcaggtttccatcttgcacagctagaggtggagttgttgggtgatagggtgtgtgcatctcagctgcagtagaaactgccaaatagctttccttgagtgcttgtaccagctcacccttttgccactgtgtatggggattccaggagctctggtcctcgctagcacttggaattgctgatgcttttactcttagccttcctgatgggtgttttctggaatcacattatgattttaatttccattccttaaagtacccttggctctgaagtttaatgattcatgcatctcttcccttttgaagtactcttacaggtatgttgtgcatgtgttgaaaagtggcactatctattctaaaatacagtatgcctcctctgtgtttgaacagttgtagcgtggccttggggcctcctgttagctggcttggagaagggattcttgggattgtagagattagacctgaggaggccccttggagctctctgactaaattttattctttattattccaaactatttaagctcaccgtgtgctgactcatcataataatgagtagctctcattgtgcttgtctatttggactcatacaatgattttttttttttctttgagacagagtcttgctctgttgcctaggctggagtgcagtggcacaatctcggctcactgcagcctccacctcccaggttcaagtgattcttgtgcctcagcttctcaagtagctgagactgcaggtgcgtaccaccatgcctggctaatgtttgtatttttagtagagacggggtttcaccatgttggccaggttggtctcaaactcctgacctcaagtgatctgccttcttcagcctcccaaagtgctgggattacaggtgtgagccactgagcttggccaaagtagttttttaagatgttagtatcttttcttgcagctaaaaaagtttgtcagagatgattctactttgttctccaggtgttttctcagggagaaattggaggcagtaagccactgggggagtcctgtggctggggggtggggtagtcctgtggctccttgtcagggagtcctgtggctggcaaggagagaagtcctgtggctgggttgggagggagtcctgtggctggggtctcatcctgtgcctaacagtgtccagaggtgccgagaccagctcagtcggggagaccctaacccagcagcgctagaggaattaaagacacacacacagaaatatagaggtgtgaagtgggaaatcaggggtctcacagcctttagagctgagagccctgaacagagatttacccacatatttattaatagcaaaccagtcattagcattgtttctatagatgttaaattaactaaaagtatcccttatgggaaacgaggggatgggccgaattaaaagaagaggttgggctagttaaccgcagcaggagcatgtccttaaggcacagatcgctcatgctattgtttgtggcttaagaatgcctttaagcggttttccaccctgggtgggccaggtgttccttgccctcattcctgtcaacccacaaccttccagtgtgggcattagggccattatgaacatgttacagtgcttcagagattttgtttatggccagttttggggccagtttatggccagattttggggggcctgctcccaatacagaggtctcgtgtaaattccctgggaggcgataagcctctgagaaacagactatgctaaccacgccatgaaagagaaacttatttataaatcagatgccagttactagtttactgcttatttgcccaggcgtagctctgacagagtccccgactcatagtgcttgctcagtgcatgctgaacaatgattggaatcaagtcatggctcagagcatagttttgaataatgggaaatggatgttcttaagtaacatagtcaccaagataatgcgactagctgggtcaccccttttcaattttaggatatttttatcaagatttaaatggccatcattagagttatagcactttctcctttggattgtcctagaggcccatgagaaagtattccctaatttcttaggagaacagtttgtgggtagtatgcggtcatgtccagttaaattgcagatatttccgatcgaagatgttccagtcctgagaacttcgtgacattagcaggacttctacaagccatctcttagggtggggcatttactgcagttggctagtactcttttctccttaactttgtcatttgttgatttttttttaactgtccccaaatactgtgggcagagtgtatctagaattgaggcctccaccattgcggagaggacatggatgctgagcagtcccctgagtgaaggttataaagaagcaaatagactacacatgtctgtaaactgctcttgagtgtcccaaatttggggtacttcagttcagctgtaggaaaagcctcaaactgtttatactttgcaagaattggaaacttctaattcacgttaagttttatgtaatacatgataagcttcataggagcttcatcttttatctacttggacttttgcttccgtaggttttgttaaaggccttcatagcgaacctgaagtcaagctcccccaccattcggcggacagcggctggatcagcagtgagcatctgccagcactcaagaaggacacaatatttctatagttggctactaaatgtgctcttaggtaaggtggaggcatatgagtggaagagtctccagcatgtactcaagatagacctttgaaataaataaaaccagatgatccctcagcttctagaccaggctatttggcactggttgattgaatgtgaactgcactggggctgctgtgagcccgcatgggtctctgtgaccctgcagatgcagccgtgcccagggactgggcagtgggtgtgggctggtgtgagccctgtctgccacccagggcctggccctctgtctgtgtcggccatgactatggtgagtcttgtaggcttgagactgtgcctcgggttcctgcgggttctctgtaggtcagttgacagtttctcctgttgtttgggtaactgtggaaacgaacactggcaagtgctgaagcgagcatgtggacgtgcgatatgaaataacgacctggctttcaaaggcagtgaggctctctggaaaggaccttgctgagctagggatgtgggtgtgtagccattcccagtgggcctcatggcgtactcgttcatgatcatgtttgtgccatcttgatctctcaggatctcttcttttttaacagattaagccgggaatctccaaacagtgagtcagatgttaagatgtcttgcttccacccccacaggcttactcgttcctgtcgaggatgaacactccactctgctgattcttggcgtgctgctcaccctgaggtatttggtgcccttgctgcagcagcaggtcaaggacacaagcctgaaaggcagcttcggagtgacaaggaaagaaatggaagtctctccttctgcagagcagcttgtccaggtaggagcacagggtttactctaggccctgcatgtgaatgactgacattcaaagaaccgattaatttggaagagaagcggcagaaccgagagttagaggtgtggactctggagctgcgctgctcgtttccaaccctaggtgctgacctctagctgtcttccctctgtatgtccctgtcaccgtgagtcaaatgcgggtgatgcctcctcaggtgccgtgttacctaagcctctcagagaccactgctaccctgtttctaaaaccagaggtcacgatatgtgttcatccacccagtaaatactgattgagcacccactgtgtgctaggctctgggataggggctgggtatacaatggtgagtatttcagctgcagcttctgccccgtggaggctgtggcctagcacactggtctaggcacggtggtatatgctcactcaaggagatagggacgtggtcgtttggggtgtcggaacaaaatgtcggaacttctctttccaatgcagagaaaccttgcagtaattctaatgtactgtgattggcagttgacttcagttctttgtagcacgcttactcaggttatttcactaactatgtaaccatgcagcctcattttaagcaattggattttttgaactttacttaaaatgttatgtcagggtttttattgtgcttaatgtgtgccatttagctaagttttgtaggatacgaaattgtaagtggcttaaaatgattcttaatagaatcatgaattgaagataatgctaataatttaagcactgagttaggtagtgtttgtaaaatgcttagaatgcttcctggcacatgttaaggccatgtaagtgctgcgtgttgataaacagctgagcaaaagtggactcttaagaaagtattggggctgagagttctgttccaaccagctgccctttggttatttttcagaataaaagcagagtctcatgggatatgacatttatatttccttcacaaaaaacactgctgagtgttttgttgagtaaaaagggtgtagccatggtaataatacatttaaaatatagtttatttcatctttaccttgccttgttttttttttaagctagctttttattgagaattccacacatacaaaagtatcaactcatgaccagttatatttcatttataatcctacttctccctttttttattatttgaaagcaaaccccaattatcctcttatttcatctataagtatttcagtatctctatagatgaggactcttctttatttttaaaactttatttttaaaatgatggtcagatgcagtgttcatgcctgtaatcccagaactttgggaggccaagctgggcggatcacttgaacctgggagtttgagaccagcccgggaaacatggcgaaaccccatgtcttaaagaaaaaaatcagccaagtgtggtgatgcatgcctgtagtcccagctacttgggaggctgagatgggagggtcacatgagcctggaagatcaaggctgcagtgatccatgattgtaccactgcactccatcctgggtgatggagcaagattctgtctcaaaaaaacaaaactgcaaaacaacgtcacaaaacagtgccattgttagacctgaaaatattaaacatttcctacatcaaatacccaccaactcattatcaatttttctctctactcttttggaatcagcatctaaataaaattggtcgataaggattgtaaatctctttgatgaactggttcccctccatcccagtttttttcccttagagttcatttattgagaaaccagattgtttgtcttctaagttttcctgtggtctgatatactgcttccatctccactgtgtaaattaacacctttttctcttctctgtatttcctgtaaatcaataattggaggaaaagccttgtcagatttagtgtatattttatatctgagtccagtatttcttatataatattttaagataagtgtactcttttaaaaagtattgaaactatatgctcaattttttttaactgatgcttttaagaaggctgcttgatcataaaagtttagagatcattggtctgatgggaaaagcaaataattactaaaccgtttagcaaggttgaggtgcacatggtggggcctggagaagttcagtcatgagccgtcacttatgggcacgtggaatctgacccggcacagagttgggagaagacaggagctttatagacagaaaatgtggtctttgctaagtcccaggagtgaaagggtgagacagtgctcacagcacacgagtgtgggtgcgtagacagagcaagggtgggtcctgaaaaggcctgcaggctttctcatagattagcaagagtgctggttacggaggtttctaacatttgtgaacagatcgaaactgtgttaaattgggattgcagtaatcctggaaggacagggatagagggtgaaggggaaaaaagggtatggatgtgagacttaattgctgattttcttaagacctttctccaaagtaaataaatgatgtggcacatttttgaactggcaaattctaaactctagatatgattatctctataacatatcttactccatcttcttttgactaaaaactgttcttaattaaattaccatgagacgttcaattcagcaaatgtagtttggctaaccatatttaattagaatttaatataatcctaggcctggccaaactattaagcaagtgtgggcaaaatattgataattttagatatgcaggaacttagtttgctttccatgtgtgcttttcgaaaaaggaataaattgaaaaatagaggaagccctgaaatccaagaagcaaactctctcacctaggcatgcagtaaaagcaattctaggatgattgctgtttggcgcgtagttcgtattagaaaccattcttcttgaataaatagtatgtttaagaagctgggcagagggaaggcatatgcatatattatcaacaaggagggagaaaaaggcaattagtaaccatccataggagggtcagcaagatttataaaggaaatttgtgatccaagtatgaagcaaaataaggtgcagaataaattttaagcaagtaatagattagagtaagagaacccatttgaccattaaccttgggacattctctttcaaatgacatggagtagtactgaaatctttctttctttctgagtctaggttattgtgactggactcagaaagaaatatttcattattgcagtgaataacatttgtgaacattattgttcataaattatgcagtgaataacatttatgaacacgtgatgtgtaagatacatactgtttatttttagttaagttttttggctcaacttctaggcagagaacattaaatgtaaatagtgttacctaggagcatgtaaatggaaatctccatagtatgaaagcagtgctgttgctaacagaatttaggagggggcagatgaggtgaaggaaatgtgggtgctgatttccttattacattgagaggagccaggagattctttgttcaaaatggatggcttaagaagtcaaagtataagctgattacgtagagcaggtacccaaaaatgttttgtgtaaggggccagatagtaaatattttcagtcttgcaggccatcccaagtctgtggcagctactcaacactacctttgtagcatgaaagcagccacaggcagcccataaatgtggctctgttccggtgaaactttaggtacaaaagcaggtgcaggccagacctgacctgtgcactgtggtttgctgacctgggattcaggggtatagaagttaccatcagaagagctaaaagtgagactttttactttatactcttctacactgtctgattttgaaaaaaagaaacatgtattttataatattaaagatagggttggcaaatagcaaataaaaatacagaataccagtgaaatttgaacttcagatacattatgagtaattttatggtgtaagtatattccaaatcatgtgggacatacttacactacaaaattatttgttgtttgtttacagtttaaatttgagtgccttgtattttatctggcaactgtaattaaagggaaaaagaataaattcattatgttcatataatgtgatatagcaggggtccccaacccccaggctgcagagtggtactggtccatgggtccccaacccccaggctgcagagcggtattggtccatggcctgttaggaaccaggctgcccagcaggaagtgagcagcaggtgagctggcattcccacctgagcaccgcctcctgtcagatcagtggcagcattagattcccataggagtgcaaaccctattgtgaactgcacatgtgaggggtctaggttgtgcgctccttatgagaatctaatgcctgatgatctgaggtggaacagtctcgtcttgaaaccatcccctggccctgtggaaaaattgtctcccatgaaaccagtctctggtgccagaaaggttgggtagcactgtgatatagtattaaaagtgctaataaatatggcatactgcctttaaaatgtctggtagctctttctcagtggcactcataatagtgttttttgatttttaaatgtgtgtcaagctgactctcccctccgtgtatgctgggctttattttccctttcctagtcaccagttttgggaaatagagatcttcattctcatgctgctcctctagtgcaagtgctccatttatttttaaggaattaatataacaaaaaatcatgggaatttagaaaacaacatggaagctaatgatcacattggtggaagtgatagggaaatatttagggggagaagttaaggtataaactttgtcaatgaagtcctattaaaaacaacaaaaaagtgaagcttaggatgcattttataaactctgaccagaacacctgtgtttctctgtttctaggtttatgaactgacgttacatcatacacagcaccaagaccacaatgttgtgaccggagccctggagctgttgcagcagctcttcagaacgcctccacccgagcttctgcaaaccctgaccgcagtcgggggcattgggcagctcaccgctgctaaggaggagtctggtggccgaagccgtagtgggagtattgtggaacttataggcaagttattagcaaggtctactcttacaattaactttgcagtaatactagttacactctattgattatgggcctgccctgtgctaagcagtctgcattccatcttccttgccaaaacttataatacaaatttcatctttattttataaataggggagttgggctgggtgtggtggctcacgcctgtaatttcagcactttggaaggatcgcttcagcccaggagtttgagacaacctggccaagtgagaccctgtctctacaaaaaaaaaaaaaaaaaaaaaattagctgggcatggtggcacatgcctgtagtcccagctgctttggaggctgaggtggtaggattgcttaagcccaagaggttgaggctgcagtgaatcttgatggcagctgcactgagcctggtgacagagcaagatgctgtctcaaaataaatttaaaaataaaataagagaattaaagtttagcaggttgggtggcaaaatgaggccacacatttaaagcccctcctcctgattcttttctctgccttggctgcctcctgtggcattttaggtgctgagaaatgaaaacagtagggaaaatagttccaggatcctcatgttaatttgccagaaatggcatcttcaagtcgtcagagggatctgagagttccttcctggcctgacttgagaaaatccgtctgtccccagctctgcgtctgcctccactgcccagtcacctcctctccatgctcttggggctgggccctaccccaccatgcagtgctgccctggagcagtgagcttggtgggtcctgtctggcatgagagctgcctttgggagctggatcccagcctctaccactgggtctggtgcctagcaggctatggataaacttctgctgactccggcctctcctaagccactgcaacgtggtcggtgtagtgcacagtgtgtgtgcagcgtggccttactcacagcctccacattagagagaatctgactgaagtcttactgctgcctcgtgtgaacataaatgtttgccagaaccatgagcaggaaatgttaatctgccttgtttcctgtcctttacacggaagaatttttttctgtatggaatgcgtgccttacaaataatgagtggaaatacccatcgctaatgaaaagttatacttgactgttagtcagctaaataatctgagatttctaatacttttaatttggcttttacaatgcaatttatcttagcttttttgatttcttaggtcatatctttagaactatatatttgaatgttaatgtaattttcatattgaaattaaaatgttgaactgcgatgttaagtgtttcctgtggaaaaacgttcacattttctctagttttaaagttgaatcaagctgtttgaagattttcacatttcttctagattttatcagcttgttactttatctgtcactttctgtgatttgcagctggagggggttcctcatgcagccctgtcctttcaagaaaacaaaaaggtgattatttcagaaatcagagtcttgtgttgaatcttactgattttcttgtatttctgtaatgtaatgtatcttgtatttcttgtaatactgtattggactctgtgtatatctcttctcagatgagtgattatatgtgtgaatgttgctggaatctgataaccaggcctgaatagttttgtagggtggcttttaaaaattactttcatatcagaattgctttgtcataaattttgaacgcatcataaatttctaatgttcggggtcagcagactttttttgtaaagggacagagtgtaaacatcttagctttatgggccatatggtctcttttgcaacattcagctctgccctgtgacaggaatgcagttgtaaagacatgagctactggccagctatgttccagtagaactttacttacagaaacagacaggctgtagtttgccaatacctgccttagggaatgtgttgttatattttgtgagttaccttctcagtaaattttatttagtattagtcaggaatattattaagtagcttcttttccagcctggtcaacatagtgagacccggtctctaccaaaacaaaacaaaacaaaaaaacagccacgcatgtggcatgtgcctgtagcctcagctgctgctcagggggctgaggcaagaggattgtttgagcccaggagtttgaggtcacagtgagctgtagtcatgccactgcactccagcctaggcaacagaatgagaccttgtgtcttaaaaaaaaaaagtttcctttgttgggttattttaatttggacctggttatcatttttcagccatatttaactttgtacatatcagaatgttctgataaaacttaacttttattaaagtgtttgtgatataatctgctagttttggtacacattatcttttgcaatgccagttattttcttttccagtgtgggtttgcataggaaaagaattgctgtcactttctattttgaaatcttaaaagactgatccttttttgtgtcatgatttgagtatttaattgagagcctaatgcctaatattatttgcagtattaaatgggatcttaacaggaatagcattctagccttcattgaattaagtaaacatttcttaagagaacttggaatctataatatttgcgtcatcatagtatgagatacttaatcaagtttgagattttagtgaaacattgtttagaagccaaaaggattctaggaaaaattaatgtctatattcttgaattaggagagattttgggacgtgtgactaagttacgctgacacttgtttgtttcttagtcgctttttccagtggcggtgagaacgaagatgactgattcacattgctcagatgagtttatcctcttctggctgggacatgggatatatcctgtctcttttaagcctttttggtatttttcccccattgagagctgtgtcttcaaactcttctgttatagctggaaaatcctttttaagtgaaatctgcccaaattataagacagatgaaggtagagttgtgttggatataggattagggtgaaagtagtgggggtgtcctggagcctctcttctggtggcagcctagctcttgtgcctttgaggaaattaccctggggacggctctgtggaacatatttgcaaaccactgatttggaagatagagatggcttttgttaagatctgaattcacctttttggcattttatttgatttctcaaggtaaagaacttattttgtaataaagtttcctattatttagtagataggccaagttgctgtgttaattccatgtagattttgggtttcctttgctcattttttcactcttaatctcacatcattgtaagtttatggaagttatcatacttctgactttttctttgaagagcagaaattagaaattcccaataattattttgatagtgtcatttaatgacactcacatgtgatgtagccacaaagatttaatgagttcagttttaaatcatattaagactgttggtttcatttgttctcattaatgtaattctgaagatgaacaataaaatgtatttttagaactttcaaatgaaatattatttcatccttccagatcatataatgcttaagttctgattgttaatcataaagtctagaaaattaaaagataataaaatgaaagtgacttttaggtattagagttttattataaattctggtgtgtcattggagctatgacatgaatatttcaaaggccaatagcattggatctttacagttataacttaccatttttaagtttaagtagtaatatagattatttaataatcaaaatcaataaatattaattattaaaatgttttgtggtatagtttgagaatcattgcttttaactttttccatataggtttattgactttaatagcattctaaacataacatctctacattctttgtgtttaatactgtggaggtataaaaatacttatatatgatgataaactatattagagtaaattaaatattcttatgagtttcattttagagtgcatttacttaattttgaagtccttatttttagcaaactaaaaggaatgttggtacattatttactaggcaaagtgctcttaggagaagaagaagccttggaggatgactctgaatcgagatcggatgtcagcagctctgccttaacaggtagttctcactagttagccgctggtgtggaccttcactgtctgccttccaccccttgcccttcctgctcgtccccctgcacctggtggacagcacgactgggggcagcagtggagccaggttgcttaaatggggcatattcgggcttcttttataatacttactctgaagcttgtgtgtctgtggtgtttgcatcatatatttgttgttttccatggtttaggctgttttaaaattaggtttatggcttgagcatagggctttgtgagtaggggatggcaggtcgaaacatctcatgagttggatgggttatgctgggggttgggaaatgggatgaaaaattatgggatgaaaaattgcctatggatagtttaacttgaaagaatctgcctttgtttacagatagttatcttttttcttttttgagatagagtctcacactgtcacccagtgcagatacccagtgtcactggagtgcagtggtgtgctcttggtgcactgcagcctccgccttctgggttccagcgattctcctgcctcagcctcccaagtagctgggactacaggtgcccgccaccacgcttggctaatttttgtatttttttgtggagacgggtttttgccatgttggtcaggctggtcttgaactcctgacctcaagtgatctgcctgcctcagcctcccacagtgccgggattacaggagtgagccactgtgcccggccagttacagatacttatctaatgaaattctctgtgtactttataaaagatgaggattaactgaaggtactaataactggattatatgagggtggttttggttgtataatcctatctaaaagaatattttagctataactgaaagtaagacttaaatatttagagaggaaaatctgaataattctagtagtaattatttatttacaaaataaaaatagatttttttttgattacacaaattaaacaacaataaaacatcacagcaatccggatactataaagctcacatgcttaccgacccaactgccccaggagtgaccactgccaacagcttcatgtcgacctttttgccataatttttatatagccttttttgtttttaaatggtaatttagaaagtcaactaggaaaatgtgttacaggtttatcttccaggagaataggactggagtcgagatcttgaatgtggcttggaagaaggcaagcccaccccagagagatgagttgacagttgtttctgaccactgcttgcttagagggcctgcgtgtctgtgaccgcctagctttgcgcccctgactaggctgccccttaattacaaatgtctttatatattgctccagctaaggcttggagtagtcggttaagaacttgaacttcggtttttgcagtgaaacagcatttgagaatatcaccttctgataagccttattttataaggtgggtactgtagtgggaggcagtgtgagagatgcttgaaggatgcactgctgtcctgcatttcagcatcttcaggatgctgtgcagctgaaacatttgataacggtggaactgttcgttattttgcaagcctgtgattccctattgaatgttttctctcgccatttgacaaatgagtgtttctctgtcttcagcctcagtgaaggatgagatcagtggagagctggctgcttcttcaggggtttccactccagggtcagcaggtcatgacatcatcacagaacagccacggtcacagcacacactgcaggcggactcagtggatctggccagctgtgacttgacaagctctgccactgatggggatgaggaggatatcttgagccacagctccagccaggtcagcgccgtcccatctgaccctgccatggacctgaatgatgggacccaggcctcgtcgcccatcagcgacagctcccagaccaccaccgaagggcctgattcagctgttaccccttcagacagttctgaaattgtaagtgggcagaggggcctgacatctttttttttattttttatttgagacagagtctcactccatagtgcagtggaggccgggcacaggggctcatgcctgtaatcccagcactttgggagactgaggcaggcggatcacttgaggtcaggagttcgagaccagcctggccaacatggtgaaaccctgtctctactaaaaatacaaaaattagttgggcgtggtggcacatgtctgtagtcccagctgttagggaggctgaggcaggagaattgcttgagcctgggaggcagaggttgcaatgagccgagatcgtgacactgcactccagcccgggcaacagagcaagactccatttcaaaaaaaataaaaaaataaagtgcagtggctcgttctcagcccactgcaacttctgcctcccaggctcgagcgattctcccgcctcagcctcctgagtaggtgggattacaggtgggcaccaccacactcagctaatgtttgtattttcagtagagacagggtttcaccatgttggccaggctggtctcaaactcctgaccttagatgatccacccaccttggcctcctaaagtattgggattatagttgtgagccaccatgcccggccctgccacctgccatcttttgagttcttccctggagacctagacctgaaccctcctgcttgttctcttgttatctaatacccctattgacagcgcagcttagatcattaatggagagcttgacctcatctgataccttcactgaaggaaacaacttagtgtcttttgtgttgaacactgaggtaaaaaattggaatagttgattatatgaactctgctaaaattgagtgcattttacattttttaaggccttgttgggccctggttaaataattatttttaaaaatccttaaggagcctattataaacagatctgtggtcttaatgaaatgtgattaatactgtgcattattttaagaacttttgacttttcaaaaaacttttacaacatttcccatttgatagcggcataggtttaagcacttctcatctctaagttagtggacaaaaaaccctcatggatagtctaataatgtttgctacaagtccatgttgagttttatactccattttattttcagttttaaaaactgtggttaaatatgtgtaacataaaatttatgttcttaaccattttttgcgtatacagttcgctggtattaaatacatttaaataatgtcatggaatcattgctaccacccatctctgtaaccttttgatcatgtaacactgaagctctgttcccattgaactctattcctcctttcccgccaagtccctggcaaccacgattcttctttctgtcttctgaatttgactactttgggttctcatatactttaggagtcacacagtatttgttttacttagcataatgtccccaaagctcatgcatgttgtagcctatgttagaacttcctaatgtttcaggccaaatactattccattgtatggataggccacattttgcttttccattcctctgtccatggacacttgtattgcttcatgttttagccattgtgaatcatgctgttatgaacgtgggtgtacagatagctcctggagactctgctttccatttttttggctaaatacccagaaatggagttgcttttacattccaattttaatttaaaacattcatatcattgagtgttttacttaatagtatagtagttaacaaacttaataaaatagtattttggtaataatttgctggtagtccattgttcagtttttttaggtaaattacacaggacatttcaagtggacatgaaacatcttgtgatgtggaatcatgccccaagctgatggctaaacatatgaaataccataccctaaatttagtagatttagtctttgcaatttaggagataacctgttatattgttaggtttttgtcgaaaagctttgtcctcatatttccaacttgctgtaaaatttgtttgtgaagacaaatatttttgtatgggttttttctttttcatattaaaaagaaatgtccacattggaatttttttggagtttttagagctaatagagcttttcataatgtagtgggaatgagtgatcagtaagctcttagcagtttccatgcgtgcatttctgtgccttgaaataaatgacagatgagtacatttgtgttctgtgtgtaaaatgtgctctttcctcattgcacttccatgttggagggcttgtctcttggtgatcacacttcaaaattctcacagccccccttgaaccgtttaggtgttagacggtaccgacaaccagtatttgggcctgcagattggacagccccaggatgaagatgaggaagccacaggtattcttcctgatgaagcctcggaggccttcaggaactcttccatgggtatgtggactacaggtgatgcgctacaaagtggtttgtattcagacctggacatcttaattatatctttgcttccaagaagaagtcctttgatactgttttctgagttctgaatagctgatgaaaatgaccaattgaggaataatcatactttttcttgatctaaatcttatacttttgagttatcttagcataaatgtataattgtattttaagtggaaatttgtcacttaatcttgatttctctgtttttaaagcccttcaacaggcacatttattgaaaaacatgagtcactgcaggcagccttctgacagcagtgttgataaatttgtgttgagagatgaagctactgaaccgggtgatcaagaaaacaaggtgagggacataggcttgagacgacttggtgtttctgagcttgtgtgaggatttaaaatcgccctggctactgtctactttattgctttcccatccctgggcctttaaatttcccctttaaataccagctcttcccaggcctgttgttttctgcctttccaggtactacccacagccttgagaattgcctgagttctgcctcctttgagagtgtgccccagacaaatctattctgtactgaatgtttccttgtctgatttcttggatcattcatttgatggttgcgtatggcctgcaacgtttcttgttttggttctactgaactgttctaaaagtctctcttcatattatctttttacatgtaaatgtaactgtcttcacttttaattcctcaaggacaaggaatagcgtttcacagttcgtcccatcaatcagaattatagcctttggcatctccctatctaccaggcccacttcctcttagatttgggcttccccaggctgttgcctttccccaagtagcttctgcttgtcctgtagaagacctttcatgctttgcttctgcagcagccgttcctgaatgcctagtgtcaactgccttcttaccacgcccaccctccctgcatgctgcatttatcccctgccacagccctgtgaccctgtgtcctgctgcctctgacttgtctgtttctgcttggccatggtctctgtgaggtcaggtgtgcatatgggcacaaaccagggcatctctttatccccagcacctggcttaagtgctgctctggaactatctgttgaatgaactaatgcatgaatgtattgttgagtatgagacaaacaagtgtcattgtctcctttctagccttgccgcatcaaaggtgacattggacagtccactgatgatgactctgcacctcttgtccattgtgtccgccttttatctgcttcgtttttgctaacagggggaaaaaatggtgagtacaaaaggggatgtgcacagttgaaggaaataactaggtttcagaggtcagcttggtggcctgtttttgccttgcgtgcagcagaggaagtagaatctgaggatgagtttggttttcactagccgaggggagggaggaaatgatgggagcaggtaggttattgggtctggttttgttcatttgaaaacaatctgttgtttgaggctgaaggtggcttgggtgatttcttggcagtgctggttccggacagggatgtgagggtcagcgtgaaggccctggccctcagctgtgtgggagcagctgtggccctccacccggaatctttcttcagcaaactctataaagttcctcttgacaccacggaataccctggtatgttaaaagttcacatcttattttctcagatttaatcattattgtaaaaactatttcagtattgactattttagttttagagcagtaagtgttttgagttcatttgggatatttgacctgcgttgtagctcttcagaaaacacatgaatagtgaagttctttgtttcatgggttccctttagatgaaacccatagaggagaaaagtagaaacctcagcacgtaagagccaacatatatacacatcggatttaaacctaaagcacaaattgtgcctggtcgcagtggcgctgagtcgcactcagccaggccaggcattcacactcagggtgagtgggaaccaggactggctgaggcagcagtggacccaagtctccatcgcgcccatgcttactatggagccttctcgttctctctttttctttgggtgagagggtacacttgtgtttttgaatttatatgaggtaagtgtgtaatagggttttttctaatcttttttaagtggaatctggaattttaatcagatttattatctgacaacctagaattataatccagaaagtctgtggtattgaggacatattggcaatatgatgaatctctaattcttaaatcctgaaacttttttttttttaatcacttagggttattatagtgaagtcatttctgaatttggatcttctcttcacacctctttttctctttcctgagaattaagcttttgtttcgagttagaaagttgatagtagggaattgttccatggctgagcaatttatctccacagaggaacagtatgtctcagacatcttgaactacatcgatcatggagacccacaggttcgaggagccactgccattctctgtgggaccctcatctgctccatcctcagcaggtcccgcttccacgtgggagattggatgggcaccattagaaccctcacaggtaacggccagtttttcagctgtgttttttctagttatgcttactaaggtttaagtttagatgatgatgtttgttgcttgttcttctggttaggaaatacattttctttggcggattgcattcctttgctgcggaaaacactgaaggatgagtcttctgttacttgcaagttagcttgtacagctgtgagggtgagcataatcttctgtggaaccatttcttcacttagtggacattttatcattgctacaattaaaattggagcttaataggaaatatttccatgcactctaaagctgtaaccagtaatacccaccatgtatccatctctcagctttagaaagaaaacgttgccagtaaagttaatgcttcataaacttcagtttaagttctaattctcagaatatttgtttgaaatagacctcttcctaaaggatatatttagaaataacctatcattaagtgtaaagtctgttgaatatgctgggcacggtgactcacacctgtaatctgaccactttgggaggccaaggtggaaggattgcttgagcccaggagttcaagactatgggcaacatagttgaccctgtccctacagaaaattaaaaaaaaaaaaaaaaaaagtagctgggtatggtggtgcatacctgtagtctcagctactcgggaagctgaggtggaggggggattgcttgagccccagagatcaaggctgcagtaaggcgtggttacaccactgccctctagcctgggcaacagagtgagactgtctcaaaaataatagtaataataatcagttgaattaaaaaaaaaaaaaaaaaaaccactgtgctaggcccatagtatggtaagagttaaagtgagccttagggattatttactcaacctctgtttctgtataaagtggaataggctcaattctttaagtgatagcatgttgaacctttccataccaactggctcataagtcacaactggccagtcaacaagagtaaaaattaactggtaaaaatcaaagcaaaaaacctacaattgtcaaatttgtgggataactcccccttttaaaatgtcatgcctgacagtaatttctctctagtttccaggttttcagtcagttgtgtcttttttgagcagaaggaagcatgctaagagctcaatcttgtggctagctgggggtctttgtgtcagccatgcatgtgatggtgcccctgggtgcttggggctgcaggggaggggtacagcagtaggggcctgttctgttctctcgtgctgtggagtacatagtgacatagtggggtggtccttggtgtaggtcccttgttcctacccctgggtctgagatttatttagaagtggtgttggggctgtgcggcaggcccctctgtaactgatcaatgtttgtgaagttgctgtttgagagttgaaaccatgacataagcagaaatggaaggaagaaagaaccagttatgtgaaagggacacatttacttttaagcttgtatttactgagataaagtattcttaatcaatgttcttgagaggtgtgggaaaaatgcaacatcctggttgcagttaaacccagaacattgtgtgttgaagagtgacggttctcaaaccgtcaagacgcgggtactgagtgggactaacctgctgtcctcttgccttggaccttgtgttccagaactgtgtcatgagtctctgcagcagcagctacagtgagttaggactgcagctgatcatcgatgtgctgactctgaggaacagttcctattggctggtgaggacagagcttctggaaacccttgcagagattgacttcaggtaagtgagtcacatccattagatttcatgaactaagctcaattgaaagttctgggatcacttgatgcaaggaatgatgttatcaagtaccctgtccatcagaaatccgagtggtttaggtagatgacagtgattttctcctcccagtggctttttgctgaactttgccctatgcttggaattttattttattttattatttatttagagacaagatcttgctctgtcgcccaggcttgaatgcagtagcacaatcatagctcactgaagctttgaactctaggactcaagtggtcctcctgcctcagcctcccgattagctaggagaataggtgtgtgccgtcacactggctaatattttttgtagaaatggggtcttgctatgttgcccaggctggtctcaaactcctgggcttgattgatcctccatcttggcctcccaaagtgctgggattacaggcatgagccactgtgcctggcctagaattttaaaatataagtagaagagtagatttttttttttggtagtcctcgtcatttaagtattctggatagtgggaataaaagagcttagaatttttcatctttgtcttaaacttttaaaaaaatgtagcttatattaattctgcttgtttaaaaagaatatactcttcattatactgaacctaggtaagacagctggtttatattttgttgcaattaaaaaacgtgagctgtggttgcagtgagccaagattgtggccattgcacttcagcctggcaacagagtgagacttggcctcaaaaaaaaaaaaataacatgagctgtgttggcactttcattttctaagagtagttttggctggagaagttttctttcagtactttcttttagaagggaaattttcctttataatttagggtttgttttttttttttccaagccaccttttatagagcccttgtgggttatttcatttaatccttagaatgtttataaatctgggcttgttctcggctccacccacagatagggacgctgagcgtgcatgagtgggcagcaagatagcaggttatggagggcccagctcaccccttctgtggcttgagccaattttatagggcacttacagagtcttttgaaatagtatttattttgaagaaaaagaaaaacagtttactgagtactgtcttattgagtctggaattgtgagaggaatgccacctctatttatttaaagccattggccttttttgttgttttgagtaagtgctgcccaaggtccttccagggcacctggatgagcctgctctggagcaagctggcggtaagtgtttactgagtaactaaatgatttcattgttaaatgtgctcttttgttaggctggtgagctttttggaggcaaaagcagaaaacttacacagaggggctcatcattatacaggggtaagcggtttatttttgtgagatgctgttttaccttcaagaaggtgaaagtgaggctttccttgtggaatttctctaaatgcattcgtcatgttttagatgtttatttcacagtttatatcatgaaagttataatcttgtcatatggatttaagtctagtaatgttgagttctttctcactagctttccaaaatatcttacctaaaatttagtcaaatacaagattatgtttatttttattatccttctctctaaagcttttaaaactgcaagaacgagtgctcaataatgttgtcatccatttgcttggagatgaagaccccagggtgcgacatgttgccgcagcatcactaattaggtatttaccaatattttatctcttttccttttttggttgaagtactaaaagatacgagaatggaaagagagggaagaattcaaaggatgtagagcagtattcctgaatctgagctcatttcagccattctattcttaaactataatgaaaaaaaaatccaaaaaagtctaaaattataattaaaaaaacaacaaaatactaactgtccattgtaaaaagtaatgcactttcattgtaaaaattttggactatagagaatagtactaagaagaaaaaaaaaatcaccttcaattctgctgccacctggaggtaatcactgttaatattttgctatatactctatgagtttcttgttcaaaatcaggtcaaaattacatgcaattttgtaatctgacaatttccacttaatattttattagcattttcctgttatgaaacagtaattttagttatgggtcgttgttttgctatgcggttgggataaaattttatatactttttttggcaattacttattatacataaatgtttgtgtatagttttctttttctgagaattcctggaagttgagttaccaggcccggctttgaatttttttttttattttttttttgagacagagtcctgctctattgtccaggtgctatctcggctcactgcaacctctgtctccctggttcaagcgattctcctgcctcagcctcccgagtagctgggattacaggggcacaccaccacgcccaattaatttttgtatttttagtagagacagggtttcacgatattggccaggctggtctcgaacttctgaccccgtgatccacctgcattggcctcccaaagtgctgggattacaggcgtgagccatggcgcctggccaggctttaaatttaaaacaaatcttctaatagctttatggaggttataatttacatttcttgaaatgtactcactttgagtgtatagtaaactccaattttatcacatttctgtcaccccaaatgtatccttgtgcccatttgctgtaacctccggttcctgccccaactcctaggcagccactcatctattttctgtcccttaagatttgtgttttcgccaggcgctcatgcctgtaatcccagcactttgggaggccgaggttggtggatcacttgaggtcaggagttcgagaccagcctggccaacatggtgaaaccttgtctctactaaaaatacaaaaattagtcggatgtggtggcacacgcctgtaatcccagctactcgggaggctgaggcaggagaatcacttgaacctgggaggcggaggttgcagtgagcagagatcgcgccactgccttccaacctgggcaacagagagagactgtctcaaaacaaacaaagatttgtattttctggacattttatagtactggggtcatagtatagatggacttttgcatttggcttcttttacttaattgtgagattggttcttgttgtagcatgtatcagtagtttgttcatttttattggcgaaagtattctattatatgaataataccatattttatctatccatcagatggatattatagagttcatgttttggctaatttatgaattatggtactgtgaacatttgcctgcaagattttgtgtagacatgtcttcatttctcttgagtagatcacctagaagtggatttttaaataattttggtacttactgtgaaactgctcttcaaaaacataccattgttccttccttccttccttccttccttccttccttctttccttcctcccttcctccctcccttccctacttccctctccctttccctttcccttccccttttcccttccccttcccgcctgcctgcctgcctgccttccttccttccttccttcgtttctttctacatatacacatttttttaaatttcaatggtttttggggtacaagtggtttttggttacatggctgaattttggttacatggtgaagtctgagattttagtacacctgtcacccgagtagtgtaccttgtacccaatatgtagttttttgtccctcaccttccagccttccgccttgtgagtctccaatgtccattataccacactgtatgcccttgcgtacccacagctcagctcccacttctgagaacatatagcagaaacatgccaaagtatactcccactaccagaatgtgattgtgcctgattcttctcaccagtacaaatatttcaaaaaaagttaaatatgtatcagttttttgggcagaagttgatacttctctttatttatttattttttttgagatagggtctcattctatgatgcccaggctggagtgtggtggtgcgatctcggctcactgcagtctctgcctcccaggttcaagtgattcccacgtcagcctcccaggaagctggaattacaggcgagggccaccactgccagctaatttttgtattttttggtagagatggggtttcaccatgttggccagactggtctcaagctcctgacctcaagtgatccacctgccttggccttccaaagtgctgggattacaggcgtgagctaccacacccggctgatatttctttttaaaataacttaccttcttttgaaagtaatacatgtttaatgaacagaatttaaggaaaatataaaaaaacgaaataatctttgtaatcaaactactgaaaagaaaaccaaagttacattttggtgcatattctttttcattttcatcattgtaatttgcatttctttgattacttgtgagacactcctttcatttacttaataggtttatatgacttgcctattcagagattttgcagctttaccattttctgcaaatgatagcaacttctttttgtttgtttgtttgtggagacagagtctcgctctgtcactcaggcaggaatgcagtggtggaatcttggctcattgcaactattgcctcctgggttcaagcgattttcctgcctcagcctcccaagtagctgggattacaggagtgtgccaccatgcccggctaatttttgtatctttagtagagatggggttttgccatgttggccgggctgatcttgaactcctggcctcaagcggtccccctgtctcggcctcccaaagtgctgggattacaggcgtgagcaccgtacccagccagtagttacttcttatattctagaaaaaattctactcatgatcaagtctccatgaggaaagagactttaattgaagatcatggggcttgcagaccaatatgataaaatagttcattgtttctaaaagtattactgagtgttgatggcagatatgaacccttttgtttttgtaggaaaatgttacccgtattctccatttgaattcagtttagatttgttaggaatcgcagcttaagctttgccatctgggagtgtttgggacagttttgcagacaaaattgcaaaagtgcctaaggaatgcagctggcattcagacctgctctgtgctcagtactctgtggacagacactgttcagcacttgttgatcagaaggtttagaaagagaactttcaaagttggtttttaattaaagcatttaatagtgtaaatagaaagggattaaattttatgacagacaaaagaaagtacagcacccagctgggcgtgggggctcacgcctgtaatccagcactatggggggctgaggtgggtggatcacgaggtcaggagttcaagagttcaagaacagcctggccaaggtgatgaaaccctgtctctactaaaactacaaaaattagccgggcgcggtggcaggcgcctgtaatcccagctactcaggaggctgaggcaggagaatcacttgaacctggacggcagaggttgcagtgagccaagattgcaccattgtactccggcctgggccacagagtgacattctgtctcaaaaaaaaaaaaaaaagaaaaaaagaaagtacagcacccagttatgtccgagtgggtgcatgagagtgaccctgagattggagacaacgctgtcacgtgcttgaagaacgccacctgagaaagggggcgagaagtggtgtccgctggtaaccagaggtgttggcttagccatctgcagggaggagggtggtctatcacaggtgagtttcatctactttcttaagcaaattaaccttacttttgtgttaggcttgtcccaaagctgttttataaatgtgaccaaggacaagctgatccagtagtggccgtggcaagagatcaaagcagtgtttacctgaaacttctcatgcatgagacgcagcctccatctcatttctccgtcagcacaataaccaggtatgctgacccagtggcatcttcacattgtcgggaaaatgccctttcctgatgcctttctttaggctttaattgaaaacattttattttctagaaaaaagcttcagctcaggatgtttgagtgtaggtcagtcctttgataggatattatcattttgaggattgaccacaccacctctgtatttaagctctgccacaatcactcagctgtgacactgtaaatctcttaatagtttattacattccatgtgctgacagttgtatttttgtttgtgacacttacgtattatctgttaaaacattttcactttagttgtgttacctttaaagaggattgtattctatcatgcctgttgattttttggtgagcgggctattaaagtcagtgttatttagggttatccactagttcagtgatttgcgagattatcattcacatttattgtggagcttttgaatatcgtgtcaaatggccacatatatcccattcttatctgcttcttaggtgagtgggacacagtgctttaatgaagctataatcttcagaattctagcttgcagagaagattgcagaagtgataagacttgtgctttttaattttgtcttttaaatgttattttaaaaattggctttatatgatactctttttttctgctgagtaacagtgttttacaaaacttggactaaatgacttctaagcttaaatgatcacttgatgctttttttctgaattaggaactcagcttatcaaatatcaaagtcataattcctgaataaataacgtcttttttcatgtaaagactgctttaaaaaacacatggaaggctgggtgcggtggctcacgcctgtaatcctaacactttgggaggcccaggtgggcaggtcgcttgagctcaggggttcaagaccacccagggcaacatggcaaaacccacctctactcaaatacaaaaaattagccaggcgtggtggcgggcccctgtaatcccagctactcgggaggctgagggatgagaatcacttgagccccggaggcagaggttgcagtgagccaagattgtgccattgcactcccagcttgggctacagagtgagactctgtctcaaaaaaagacacacacacaaacaaaaaaaacatggagacatttttttggccaccttaatatttcccctcagataatttcctttgtttaaactcagaactggcattttctctcttggagaagattcaggacaaatactcctttaagataagtagaagcagtgaaagaggatttgattatcaggaatttgataagcttagaataaattgttgcttcttaatgtcatttcagaagatgaatatttattaatagatgccaactgagatatcattaaaattgattactaactactacttggaaaagtctcccagttccaaacttcagcaggcctcttgacaattcagctgtggtcaattgggtcttgcgtgatagatacaatgaccaattgtgcagcagagtgtgctgcttagctgcctattctgttagcattcatgtgttaacttaaaatcataatctccttagttttgttgagtgtctccgtggacaagacactgtgagggatacaaaatcagattggctttattcaaaccactggggtattataattcatttataatttattttattttttgccttttttccatgtgttctaaaggaattagagtttgtatataactataatgggggatagaaattgacatgtgccatgaagggaatgcaaaaaagtgccgtgggagatgagaagtggagaaaggaatttcttttttcttggaagcaggaataacttcatgaagcatgtatttcaacttaaacagatagtaggcaacgctgtaaggggagtatggctgcagcaaaagtgttcggggcagactgggaggaagggagggaataaattcagccattgttatggaataatgatcaaaatttattttcagcccgtttcacttaaaagttgagactgcttaactttttttaatctttaatcttaaacttttaaatgccatttgatctttaaaaatatatgttttaatagtgtattttaagtctctatatttttgttattagaatatatagaggctataacctactaccaagcataacagacgtcactatggaaaataacctttcaagagttattgcagcagtttctcatgaactaatcacatcaaccaccagagcactcacagtaagtctctttcttgatcggtcttactgacattgtaatagtttttggtagcttgtatggccagttagttgtatggtcatcttacggtgaggtgcttgtcttacagctcttacttatccatgaggcttgctaagaaattgtgcttctgtgaaaagaatctcagcttactccaggaatgtaaatgactatgttttttctgattattaaagtaatacacgcccaaaataaaaaaattcagccaatttaggaagacacaacaattaaaataagccaggcatggtggctcatgcctgtaatcccagcactttgggaggccaaggttgggggctcacttgaggtcaggagtcggataccagcctggccaacgtggtgaaaccccatctctactaaaaatacaaaaattagctgggcgtggtggcgggcgcctgtaatcccagctactcaggaggctgaggcaggagaatcgcttgaacctgggaggtagaggttgcagtgagctgaggtcaagccactgcactccagcctgtgcaatagagcgagactctgtctcaaaaaaaaaaaaaaaaaaagaaaagaaaaaagtaaactactgtcacctgcattggtaatgtatcagaagtttaaaatgtctagattataattaactcagtgacctggtaatatatactaagggaaaaatatttataatttacatttttacatttttatttttttaattttattattttttttttgagacagagttttgctcttgttgcccaggctggagtgcaatggcatgatctcagctcaccacaacctccacctcccgggttcaagcaattctcctgcctcagcctcctgagtagctgggattacaggcatgcaccaccatgcccggctaattttgtatttttagtagagacagggtttctccatgttggtcaggctggtctcaaactcccaacctcaggtgatccgccctcctcgaccccccaaagtgctgggattacaggtgtgagccaccatgcctggccttacatttttataataagaatttatgttgctgacattagaaaagaaccataatatccaagaatccaagaataattaaattatgtacatatgctagtatatagtgtgatgctttggagaatttttaacaatatggagatgtataatctggattgtaatattgagtgaaaaaaggcagaatacaaacctggtgggggtatagtcggatttcagttaagaaaaataatatttacatatatacatttctcacactggcagataatcaccaagataaattttgggattgtggatgatttttttcttctttatatttttcagatattctcaaattttctaaaatgagcaagtataacttttgttatcagaaaaaaataatatacaaaagtaatgttaatttgctggtgaccaggttaaacctttttatttttattttttgagatggaatctcactctgttgcccaggctagagcacagtggcatgatcttggctcactgcagcctccgcttcctgggttcaaatgattctctggccccagcctcctgagtggctggaattacaggcgtgtggcaccacacctggctaatttttgtatttttagtagaggtagggtttcaccaggttggtcaggctggtctcgaactcctgacctcgtgatccacccacctcggcctcccaaagtgctgggattacaggcgtgagctactgcgcccagccagacctttttattttatttgacaaaagaaatacttccatgttatagaagactaaatattgtttgggctgtctgcagtatggtcttcccttgatttgttcaaaatatcgtaaactttgcttatttatttttattgtggccgactgtgtcgggcactgttgtaggcttgggatggaaaaacaggattcctgcccttagggtttctgcaggctggtcagggagacgatgtggtaagctggagctcagctcctaaggatgtgcaggggcagttgagaggcggaagggtgggagatcattccagggtgtgggcagcacaggaacctctcttcattgggatataattgccattctgataacacgtgtttgaggtgtctaaagtaggaagttgtaccatggtgggacagatatcctgtggttatcatacacagatctcagttttcttctcattgtttgtactttttataaagggtaacaggagatataattcaataaacctttgtggtgtttgggtgtgattttattgtttctttcttctcagtttggatgctgtgaagctttgtgtcttctttccactgccttcccagtttgcatttggagtttaggttggcactgtgggtatgtattttcctcagtatatattaatagttgtctacaacagtatgacataaacatagttattaggatgccctttttctttctttttaagtcttttatcaatttggctttttggaaaaatatctgatggaatacttgtttctgctatattagctgtgtgagactagtgacaggagctgtgggaaatgaatgccaaatgttcttaggcattgatgggaatttcagggtgtggtcttcaagttcatttaagggaattttcatatgctggcaaaaggcttttctcattagcttgactctttccaaaattatttgctgtgaattagaagtttaggaaccttttttcacttaattgtgacctagcatacgaaatggtgatgatttaggaactactgttcttgtattaacagcttttatttaaaaatgattttcctccagtagatggccctactagcatctgggaaataatttcaagtcttctccagcattcaggaataggctttcattttgtgtatcaattactgagaatgattttggtgactcacatcacatttgagaagtaaacctgcagatttcttgtgtgtgtcagcaaatgaccaactgatatttgcttgaagtggattacattatctgctctagaatgattgctttcccaccttcctcacatacagactgagcagctacggtttctaatcataggtctggcactagacttcacttctgggcaactttggcattggagtaaaatgtattaatttaaagaaagttaaaaatccgttcaagtaaacatacagttctaatactttttacaatttaaaatatagatttaaatgataaaataaaaaagaaaatatgggtagacaccataatcctcgtttctgcatctgttcacaaggggttgatatttatgagttctattctccatatccattctatgttctcttaatgctcagtcagcacctcaggtggttggagttcaatgcttggtagtttgacttacactgtcttttctaggggattgagccctgggtagtcctgcttatttgaggttgcaatttgtctttcaataacttttactacaagatatggcgtgttaaaggataccattggggaaccaacataataatatcaggaaaactaaccacgtcagacctgccccattgtgtatcaagtacactatttttccatagtaataaagagttcaccccagccaattctcttttattttgtgcctgtttactcaatggcattaacatgcccaaatgtctgggtagctgtctcatctccagttcagcagaaccattgtcatatgccctagtaaaagcattccttcattggacacttaggccccaatactttcattcagatctactacctgatttcatttctcaaatgatttttatggagctctgatttataggaaagatgttagttgattaaaaataaaacaatttctgagctggtataaaatgtattgtgacatgccttcctcttggaattgcaagagaaaggaagactgttgtttgcttaaaaattgtctataatttgactttgcaaatgtctgcttccagagtgcctccactgagtgcctcagatgagtctaggaagagctgtaccgttgggatggccacaatgattctgaccctgctctcgtcagcttggttcccattggatctctcagcccatcaagatgctttgattttggccggaaacttgcttgcaggtactggtactgagttgaaacagggactccaggacttggattttgatttccttagggggaatgggggtggtgagcatatgaggggaaaatactataaggtcattgccagtgatggcttgtccctttagtcaaatttcagatgttacctatatgcataaacacatgcagttggcagctgttctgtgctgagtattttaaagtagcctcttcccaatatagcccctcagttaactacaagtaaactcattttgaatttcattttaatgggcaccatatgccagtactccctcgggcactgggatgttaagaaagtataatgtatggacttcattctcaagttagttttagattagagggggatacacgtaaacaaaagtgcagtggtcacacagagtggccctaatcactctccttgggcagatttatgggctggtaggaaagagcacaacacggagagggtgtagcaccttggcgatgataatggaggatgtggccagcaaggaagacggagtccattgaaattgattttgggagaagttgccaatctccatgaaagaattggggcctgtgctatttgcttcagggggctataggagagtttcgtgaaagggactaaaagatgagtattttaataagatcattcatccaacttgaacatgggctggaggagaaggtagggagactcaggagattaatgttgatgctaaggcaagataatggctttgggactgtagggaagacactgattgtaagagaatgaaggaggcagaattgccaggcctggttcaccaactgaacttcggttgtgaagacaaagaaacctgggatgacttcacatcctgggcaggtgtgtggtggtgacagtcatggaaattgggaacacagatttgtgcgggaaacatcagtttcagtttgagtttggcttatcagttgaatatcaggcacagatgtctggccaactctcaacatagggtcttaaatgacttcagttccccaagcaatttgtccttcccatgctattggggtggagaggtaatgtctgtgcccatatcacagccagtgctcccaaatctctgagaagttcatgggcctctgaagaagaagccaacccagcagccaccaagcaagaggaggtctggccagccctgggggaccgggccctggtgcccatggtggagcagctcttctctcacctgctgaaggtgattaacatttgtgcccacgtcctggatgacgtggctcctggacccgcaataaaggtaatgtcccacttgggtgctggattcatacagccttaatgactatgggtttccagactacctttgtttagtaatctgtcccttctttattctctttttgctttaaatgaacaaaattgctcagattgtgacactaaatttaacatcaaaatgtgaccatgtggatgggtgcagtggctcgtgcctgttattccagcactttgggagactgaggcaagtggatcacttgaggccaagagttcgagaccagcctgggcaacatcacgaaaccccctctctactaaaaatacaaaaaattagatgggttgggccgggcgtggtggctcaagcctgtaatcccagcactttgggaggccgaggtgggcggatcacgaggtcaagagatcaagaccatcctggctaacacagtgaaaccccgtctctactaaaaatacaaaaaaattatctgagcatggtggcgggcgcctgtagtcccagctgctcgggaggctgaggcaggagaatggcgtgaatccgggaggcggagcttgcagtgagccgagatcgtgccactgcactccagcctgggtgacagagcgagactccgtctcaaaaaaaaaattagatgggcatggtggtgcgtgcctgtaatcccagctacttgggaggctgaggcaagagagttgcttgaacctgggaggcggagtttgcagtaagccttgattgtgccgctgcactccagcctgggtgacagagtcagactctttccaaaagaagaaaaaaatgtgaccatgtgttttatagctcttttagtatcatcagtcactgttatccctaagagggaaatacctagctttagttttaggtttccagcattagccaagaaagctcagaattgatgttcctggccaagtacctcattgctgtctccttaaatcttggttaatggctactgtcctggctagcatagttatggagcatttccatggttgtagaatgttctgccaatctcagggacagttttgcttttctgtgaagcaataaaatcaacttcaaaacaaatgttaactatttgtacaatggatttaagatagaccagttcacatacttttttttttttttttttttgagatggagtttcattcttgttgcctgggctggagtgcaatggtgtgatctcagctcactgcaacttctgcctcctgggttcaaacgattcttctgcctcagcctctcgaggcagattacagctgggattacaggcatgcaccaccacacccagctaatttttttgtagttttagtagagacggggtttcaccatgttggtcaggttggtctcaaactcctgacctgaagtgatctatccgcttcggcctcccaaagtgttgggattacgggcatgagccaccacgcccagcctaagatagaccagttcacttactgtttatatctgattactctctctttgccttgtcttctacctttaaaaatctccctactaacttcccattctcctttagctgccatcagtcttctcccttctctgcaaacatctctggagagtcccagcctcagcccacagagcttcccactgctctgaggtggaccttgtttgcaaggcttctttggctctcttggcctggaccctgtctactacttcagccatccttccttaacccctgctggtggtttctgttgccacactccatagcagcgtttcccgcccagatcatgtctttacatctctgggcactgctctggtcctgcctgcctttccctctttgtatcctgcaggctgctacccccatcttgagtgtcctcttcagttggctttcagagggcctcctgggtgttcccttacccacttgccactccccagtcactgggttcagtccttcctgcccaccagcacatgctttctaggctctgtcctaggccgtcttctctctttgtagtctctgggccagtgctgttctagagagtggcagaattttctataaccatggcagtgctccatagctatgccaggcaagacagtagccactaaacacatatagctgttgagcccttgaaatgcagctagtgtgactgaagaactgaaccccgattcggtttaattttcattaaatttaaatttaaataaccttatgtgggtagtggctccagtattgggcagggcagcctgagagtcggggctgttctcctgtcttcagtgtctagatgagggacctcagaggacctgtctctggagctgcagttcaatgtagccagctgccccgtgacacttacatatagctgatttgtggatatgtcagacacggtgtgatgagctcagctttctgtcctcctccccacatctgcccctgccccatttaccccactttgtgtcttatcaagctagaaacaggtcaccacaagtcttcatttccactcaccaagtcttttgtttcccctactaaatattttgcgagaagaaagtgtgtacctttgtattcacatacatgtacatgcacatatacatgcacatatgcaggggtccccaacctctgttaaaaaccggactgcaggccgtgcgtggtggctcacgcctgtaattccagaactttgggaggccgagaccagtgcatcacaaggtcaggagatcgagaccattccggctcacacggtgaaaccccgtctctactaaaaatacaaaaaaaaattagccgggtgtggtggcgggcgcccatagtcccagctacctgggaggctgatgcaggagaacggcgtgaacctgggaggcggagcttgcagtgagccgagattgtgccattgcactccagcctgggcgacagagcgagactctgtctcaaaaacaaaacaaaacaaaaaaaaaaaaaaccaggctgcacaggaagaagtgagcaagcattaccatctgagctctatctcctctcaggccagtggtggcattagattctcataggagcgtgtatgagttcgttctcacacttctgtaaagacatacctgagacatataaagaaaagaggtttaattggctcacagttctgcaggctgtacaggcttctgtttctgggaaggcctcaggaaacttgcagtcatggcagaaggtgaaggggaagtaggcacatcttcacatggcccacaggaaaaagagagaaggagagagagagagagacagagagagagagagaaaaagaaagattgagagggagagaggagggagaaaggagagtgcctgtagggggagttgctacacaaaggagcaccagggggatggtgctcaaccattagaaactacccccatgatccaatcacctcccaccaggccccacctccgacactggagattacaattcagcatgagatttgggtggggacacagagccaaaccatatcagagcatgaaccctattgtgaactgcacatttgagggatctaggttgcatgctccttatgagaatctaatgcctgatgatgatttgaggtggaacagtttcatcccgaaaccatcccccgccaaccctggtttgtggaaaaattgtcttccacagaaccggtccctggtgccaaaaagtttggggacctctgcacatatgcatgcacctgtacatggacacataatacatgtacatatgcatactttatattctctgccacttctggtccagactgatatactatctcatttggattactgcactagccttttgttttggaaacagcattttttaaaaaatttaatttaatttttttgagatagggtgtcattctgttgcccagcttggagtgcagtgtcatgatcatagctcactgcggcctcgatctcccaggctcaagtgatccttctgcctcagccttctcagtagttgggactacaggcatacccaccatgcccagctaattttttgatttttttttttttttgagacagagtctcagcctgtcgcccaggctggagtgggttggcgcgatctcagctcactgcaacttctgcctcccaggttcaagtgattctcctgcctcagcctcccgagtagttgggattacaggcgcctgccaccacacccagctaactttttgtatttttagtagagacggggtttcaccatgttggccaggctggtctcgaacttgtgacctcgtgattagcccgcctcggcctcccaaagtgctgggattacaggcgtgagctaccgctcccagccaggaaacagcattcttgagataattcatataattcacccatttaaagtatataattcattctctttagtatgcccacagagttgtacagccatcaccagaatcagttttagaacccataaaggaactctgtactctttacccaaaacctccatgcctccagctgcaggcagccactaacctgccttctgtctctgtgactctacgtcttctggacattactgtggatgggctcatacagtcagtgagcttgtgactggtgccttctaccaagcagggttttcagtgtagcagcctctctgtttttcttttttttttaaattgtgacggaacttctgcctcccgggttcaagcgattctcctgcctcagcctcccgagtggctgggactacaggcccatgtcaccatgcctggctaattttttttttttttttttttagtagagatgggtttcaacatgttagccagggtggtctcgatctcctgacttcatgatccgcctgcctcggcctcccaaagtgctgggattacaggcgtgagccaccatgcccggctaacctttcatttactgtctgcatttcttccctgatgccttccagtccatgcacccgattgtagccattcatcctattatggtttaaggtgactgtcttagtcagcatgggttgccataacaaaataccatagcctgggtggcttcaacaacagaatttacttctcacacttctggaggttgggaagtccaagatccaggactttcgccttgccctcatgtggtgagggggtgaggaagctctgtggggcctcttatatatggatgctaatctcattcatgaggggtctgccctcatgacccagtcacctcccaaaggccccacctcctaataccatcaccctggtaattaagtttcagtgtataaatttgggggactatagacattgaaaccataacaagcacttttctaagatcagggagtgagtaagtagcagagctaggacctcaattccacatgtcagtcatcttgccttcactctgctccatgatggctgcctcctagagcattgggagtctcgatgttctatatgctctcatgtgttgtgtattggagatagttgaggctttatgaatacatctggatttgttgacttctagctttgctggtaaccagctgtgaccttgaataagttacttcatctctgagcctgtttcctcttttagaaacaggagtttaaaatgctgctttgggttgggcacggtggctcatgcctgtaattccagcactttgggaggctgagatgggaggatcactggagcttggagttcgagaccagcctgggcatcatagtgtgagatcctgtctcctcaagaaattaaaaaattagctgggtgatgtggcgtgtgcctgtggtcccatctactctggaggctgaggtgggaggattgcttgagcccaggaggttgaggctacaatgaaatatgattgcaccccatcctgggtgacgagtgagaccctgtctcaaaaaagaaaaaaaaaatgctgctttgtacccctttcatgtcatggcgtcatggccaacatagaatgccctggttgtttgctgttggagggcatgggcctgggggctccctgagggctccttccatcttcaactcattctctgtgcacctgttaggaagttgtgggccagtccctaccatgtatcattgtgtgggtaaaagtaaataaaatgtgtacagtgtctgaactgtacatatcagggtccaagaacaaaatgagtgacatgggttagctctttttaataaatggtaaaaccaaatattctaattttcagttttgttatacttccatcacatgtttttgtttttttgttttttgtttttgtttttctattttaggcagccttgccttctctaacaaaccccccttctctaagtcccatccgacgaaaggggaaggagaaagaaccaggagaacaagcatctgtaccgttgagtcccaagaaaggcagtgaggccagtgcaggtaggaaacagcgtggggaagggagggacatgagtgcagcatctgtcatgtagaaacataggatttaagtaacttggtgttttagagaaataaatataatacacatcagtaaagtgagagaaagtttctccaggtgcggttcaagatattagaaactaatgactgatgtacacagaccaccttttggtctgaagcatttctaagtgccactggctgacatgcagcccctacagcctccaggcttccagccctagcatggagcatcactctcctatgcttccctggttgcaggtgatggctggagaggcctcctgattttcagtaagggaagtggtgtagatgcttaggaatagatgtagtgagtgaaaaaactgattctgatatgtcaaaaattctgattggaaatggaatatttacatttggaagagctaaaggcgagagaaagtggggataaagtcatctgagttggaggagcttaaaccattcacaagtttggaggacctttttttacccatgaaaaggtcagaacagaaggggctaggatttaggtgtgactgcagtttattgaattcccatccatactgctctcggtgggcagtggcaggggcaggagaggagcctggcaaagcatgaagtgactgctgctgcctctgctatctgggacgcctggccacctgtctgtacagtctccctccagacccattctcacgctgtctcttggcacccaggggccagtgatggttctcccatttgttttgtgtatatagcatttatatcaaggctatttatttatttatttattttatttatttatttttttgagacagagtctcactctgtcacccaggctggagtgcagtggtgcaatctcggctcagtgcaagctctgcctcctgggttcaagcaattctcctgcctcagcctcctgagtagctgggactacaggtgtgcaccaccacacctggctaattttttgtattttttattagtggagacggggtttcaccttgttggccaggatggtcttgatctcctgacctcgtgatccgtccacctcagcctctcaaagtgctgggattacaggcatgagtcactgtacccggcctatttatttatttttaattgacaaaattgtatatatctgtaatatacaacatgatgtttgaaatatgtgtacattggccaggcgtggtggctcacaccttttatcccagcactttgggaggctgaggtgggcggattacgaggtcgggggtttaaggccaaactggccagcatggtgaagaggtgcccctactaaaaataccccaaaaaaaaaaaaaaaaaaaaaaagccgggcatggtggctcgcgccagtcgtcccagctacttgggaggctgaggcaggagaattgcttgaatctggcaggtggaggttgcagtgagctgagttcatgccactgcactctagcctgggcgatagagcgagactccgtctcaaaaaaaaaaaaaaaagaagaaatacatatgcattgtggaatggctaattaacctgtgcatcacctcacgtatcattgttttgtggtgagaacacttaaaatctactctttcagtgattttcttgcatatggtacattgctattaactgcagtcaccatgctatacagtagatctcttgaactcattcctcctgtctataaatgaaattttgtatccttgaccaacacattcaaggttttttttgagatggagtcttcttcacccaggctggagtaccatggcacgatctcatctcactgcaacctccgcctcccaggttcaagcaattctcctgcctcagcctcctgagtagctgggattacaggcacatgctactgcacctggctaatttttgtatttttagtagaagtggagtttcaccatgttggccaggctggtctcgaactcctgacctcaagtgatccgcctgccttggcctgccaaagtgctgggattacaggtgtgagccactgcacccggcctcaagcgttttaaaagatgctcttttctaaggattgactgtagtacaggaggaagattgacctgttgaaaagcctcagcctttacaagtgtaaaattatcagtatattactatcatctttctgatgaattaaataaactaaggactccaagtcaaaagtcttcaaactgaagtagaatagttgtatatagtgcttggcactttaatatttagtatcggtttaatgataatgtttgtgcctttgccgtctttaaaacatttttacatcatccctgtttgattacttggtgtgctcatgaagttgttggccactaaggaatcttaggctcagagaggttctggaattggccagtggtccttgaatcagctgctcctatgattctctaactgatttctcacaaagcaaacaagcaatcataacaaaacaactgtgcacactgctcttcttattttgttatttaaaaagtacttaggctctacttatgtttgttagtcaatttctcattacttctagttaatcaaaaggtcagaggaaatacttgaatattttcatactagaatactttaaaaaatcatgatttccagtaatctctttaaaacttggcaagttattttgatctaaaagtttatcttttgtgtgcatatttttaaagcttctagacaatctgatacctcaggtcctgttacaacaagtaaatcctcatcactggggagtttctatcatcttccttcatacctcaaactgcatgatgtcctgaaagctacacacgctaactacaaggtatgggcctctgcatcttttaaaaatatatatgcacacatacttacgtctaatggatagttgatgtttttcttatgatttgtaggatgtataagccctttgagatatgagttacatttagttttttcaagtttgtttgtctttcagctttgtttatgatagcttctatcatacaggtgttttggattttcatattgtttgtactcacagctaagattgattacagtgacagagctaggatgtgcagccaggttatagggggaagtggccctggtggagtctggagggatccgtgtacaggcttccttccctcccgtgaggctcacacaaaaatacagcaacatgctggtcctgcaggtaccctctgcctaacatgagccacaattccagactcacagaagaaaagcaggtgttcggcataaaccatgtgtttcaaatagtctgggcatggtgagccacttgttatcagctagggaaagtttatgtcagcgtaagaaactgttcaccagatacccccaagagccagcctttctgtctagggatgttttagttttttagttcatttttttttttaactttaaaattttctgttcatctgcaatttgttagatatgaagtatgtgtctaatttaatttttgtttttggttgtccccaataatgtttacagaagaatttttctgcactaattggcttgagttacttacattctcatagttctctagtttcagtagtttcatttattattttgttatatcaatctatctgtctgctcatctattagaagcatccttgttttttttttttcttttttagacagagtcttgctctgtccccaggttggagtgcagtggtgcaaccatgcctccctgcagtctcagggctcaagtgatcctcccacctcagctcctgagtacctgggactaccggcatgtgccaccacacccagctaatttttacattttttgtagagacagggtctccctaagttgcctgggctggtctcaagctcctggcttaagtaatcctccctccttggcctcccaaagtgctgggattacaggtgtgagcaactgcacccggctacaagtatacttcttaattattgtagcttaatggtatttatgaggggatcagttcccctgttgttctttagaattttctggatattcttctttattgattttgggatgtgaacaatagaatcaacttctacttgtagattgatttagggagaacttatacctcagatgttaagtcaccctgtccagaatgtgggatgctttcctatttgttcagaactttttaaattacctcagaagcacatgaaatttaaaggattttaaaaaaaacttaaagattatttcacatagctcttgcacatttcttgataaatgaatcctcaggtattcctctgtttttgttactaatagttacttcttatgggttttttttcccctgaaaatcatttatcaaacgtatgtggcttattttctgaaggatgtttgataattttggaagatatgaaagtcttcatattttacaaggtttgaggtctctttaagctgcatggttctcatgtcagctcccaaagcagaagacggcatgttgaaaaatgccgtagagaagatacttcttttccacctgttttcaactcatatcatcttgaatttcagggcacctttccatgctcctagtgcttgctatctgtttattattttccttcctgaataccctgaactccagcatgttctgctgtaattctggcctccctggcatcttggactcctgtttcctttgctctgtcatccccgcggtcagctcctgctgcgcagcttctcagctgaagtgcgtttggagtgcctggcgtgtcttgctggatctttgagtattgcctctggtttccttggttccttctgctgagttgctcagcgtctccactccccatttcttgtgtggcccttcctgcactcctctgattccttttgtcttccctggtttcttgctttggtttcgagtctccacagaacttttgcagctcttctgaagacctggaagctttttcatcttaattctcatctcatgacctcttttcccttctttgagagctagaacttcccatggtgaacttctctttccagaattccatgccttcttttccctcccacttacctgttgtccaggagaggtcagattgctgtgcatattggaggagaaccctttcttccctgggctcttcatctcacatgacatcaccacatcacctcgttccttggaccctcagtggtgtcactgctggatttttctttcctttggctggccttagggcacacccaggttgactagcgtagtcatggtatttagatccactcacattttcagtttctgtgtctgtctcttgcctgcttctgacttcgcccagagaaagcttctctttcacaagggttcttagatttatgttcactgagcaccttcttttctgaggcagtgttttaccaatatttattttcctagtcagtctcgccttacctttcttgttatgcatgtctttggtcctgacccattctctgagtctgtaaaatagaattgctgtataatttaattacatgaaatcctttagaatcttaacacatcttacacctgatttaatattttattgtatccaaattgaaccaaccctatgtgaatttgacagtgatttctcccagggatcctagtgtataaggaataggacttagtattttctattttttgatataccacataccagatactgattatgatggacatttaacccttttttctcattatgaaagaaagttaggaattatttcttccagtagcgccagtgtaacctgaaagcctttgaaagagtagtttttgtatagctatctgaaaggaatttctttccaaaatatttttccagtgctgacaacaaacacgcagacacaccctgcaaggtgagtgtacggcgccgcacagtggaggcatctgctgcagccgtcgatgtttgtgtctttggttgtacattatgagatcgtgacagggccagtaaccgtgtgttctctccttcaccttcccaaggtcacgctggatcttcagaacagcacggaaaagtttggagggtttctccgctcagccttggatgttctttctcagatactagagctggccacactgcaggacattgggaaggtttgtgtcttgttttttctccttgggttgtggctggcacacttgatgtgcgtcttctgggctgagttcatctaggatggagcctggttctccagggtgcctccgggagactcctccctgccccacgtgcttgcgtcacaggacccaagtctgactctgccttagccatgaagtttagggggaagtttctatttgtattctatttttgtctgttatcatgtattagcttagacccagtttagtttggaaaatcagtgggtttcaaaatgtgtttgtagagtcctttatttcttaacttgaccttttcaagtggaaaggggcaaaacagacgggtaagggggcggggcgggaggtgtgacttgctcttttgtgcctgaggaagtaacagagctggggttgacagtcatattctctgacacagatagtctctgacttatctcacagaaagtcagcggcagagcctgagttaaaagtctcgtagattttctttttcttttttttggtggctaatttcagttttatttatatttgtttatttatttattatactttaagttctgggttacatgtgcagaatgtgcagttttgttacataggtatacacgtgccatgatggtttgctgcacccatcaacccatcacctacattaggtatttctcctaatgttatccctcccccagtcccctcactccccatgggccccggtgtgtgatgttctcctccctgtgcccatgtgttctcattgttcaatttccacttgtgagtgagaacatgcggtgtttggttttctgatcttgtgatagtttgctgagaatgatggtttccagcatcatccatgtgcctgcaaaggacatgaactcatccttttttatggctgtatagtattccatggtgtatatgtgccacattttcttaatccagtctatcattgatggacattcgggttggttccaagtctttgctattgtgactagtgccacaataaacatacatgtgcatgtgtctttatcgtagaatgatttataatcctttgggtatatgcccagtaatgggattgctgggtcaaatggtatttctagttctagacctttgaggaatcgccagactgtcttccacaatagttgaactaatttacactcccaccaacagtgtaaaagtgttcctatttttccacaacctctccagcatctgttgtttcgtgactttttaacgatcgccatcctaactggcgtgagatggtatctcattgtgattttgatctgcatttctctaatgaccagtggtgatgagcattttttcgtatgtctgttggctgcataaatgtcttcttttgcgaagtgtctgttcatatcctttgtccattttttgatggggttgtttgcttttttttcgtaaatttgtttaagttctttgtagattctggatgttaatcttttgtcagatgggtagattgcaaaaattttatcccattctgtaggttgcctgttcactctgatgatagtttcttttgctatgcagaagctctttagtttaattagatcccgtttgtcaattttggcttttgttgccattgcttttggtgttttagacatgaagtctttgcctatgcctatgtcctgaatgttatggcccaggttttcttctaggatttttatggtcctaggtcttatgtttaagtctttgatccatcttgagttgatttttgtgtaaggtataaggaaggggtccagtttcagttttctgcatgtggctagccagttttcccaacaccatttattaaatagggaatcttttccccattgcttatgtgtgtcaggtttgtcaaagatcagatgattgtagatgtgtggtggtatttctgaggcctctgttctgttccattggtctatatatctgttttggtaccagtaccatgcagttttggttactgtagtgttgtagtatagtttgaagtcaggtagtgtgatgcctccagctttgttcttctagcccaggattgtcttggctatgcaggctcttttttggttccatatgaagtttaaaatagttttttccaattctgtgaagaaagtcagtgatagcttgatggggggatagcattgaatctataaattactttgggcagcaaggccattttcacgatattgattcgtcctatccatgaacatggaatgtttttctatttgtttgtgtcctctcttatttccttgagcagtggtttgtagttctccttgaagaggtccttcacatcccttgtaagttgtcttcctaggtgtttcattcccttagtagcatttgtgaatgggagttcactcatgatttggctctctgtttgtctgttattggtgtataggaatgcttgtgatttttgcacattgattttgtatcctgagactttgctgaagttgctaatcagcttaaggagattttgagctgaaccaatagggttttctaaatatacaatcatgtcatctgcaaacagggacagttttacttcctctcttcctatttgaataccctttattgctttctcttgcctgattgcgctggccagaacttccaatactatgttgaataggagtggtgagagagggcatccttgtcttgtgccggttttcgaagggaatgcttccagtttttgcccattcagtatgatattagctgtgggtttgtcataaatagctcttactatgttgagatacgttccatcgatacctagtttattgagagtttttagcatgaaaggctgttgaattttgtcaaaggccttttctgcatctgttgagataatcatatggtttttgttgttggttctgtttatgtgatggattacgtttattgatttgcgtatgttgaaccagccttgcattccagggatgaagctgacttgattgtggtggataagctttttgatgtgctgctggattcagtttgccagtattttattgaggattttcacatcgatgttcatcagggatattggcctaaaattctctttttttgttgtgtctctgccaggctttggtatcaggatgatgctggcctcataaaatgagttagggaggattctctctttttctattgattggaatagtttcagaaggaatggtaccatctcctctttgtacctctggtagaattcggctgtgaatccatcctggactttttttggttagtaggctattaactattgcctcaagtttagaacctgttatcagtctattcagagattcagcttttttctggtttagtcttgggagggtgtatgtgtccaggaatttatccatttcttctagattttctagtttatttgggtagagatgtttatagtattctctgatggtagtttgtatttctgtgggatcggtggtgatatcccctttatcgtttttattgagtctatttgattcttctctcttttcttctttattagtcttgctagcggtctacctattttattgatcttttcaaaaaaccagcacctggattcattgattttttttggagggttttttttcgtgtctctatctccttcagttctgctctgatcttagttattttttgtcttctgctagcttttgaatttgtttgctcttgcttttctagttcttttaattgtgatgttagggtgttaattttagatcttttctgctttctcttgtgggcatttagtgctataaatttccctctacacactgctttaaatgtgtcccagagattctggtatgttgtgtcttcgttctcattggtttccaagaaaatttttatttctgccttcatttcgttatttacccagtagtcattcaagagcaggttgttcagtttccatgtagttgtgtggttttgagtgagattctcaatcctgagttctaatttgattgcactgtggtctgacagacagtttgttgtgatttctgttcttttacatttgctgaggagtgttttacttccaactatgtggtcagttttagaataagtgcaatgtggtgctgagaagaatgtatgttctgttgatttggggtgcagagttctgtagatgtctattaggtccgcttggtccagtgctgagttcaagtcctggatatccttgttaattttctggctcattgatctgcctaatattgacagtggggtgttaaagtctcccactattaccgggtgggagtctctttgtaggtctctaagaacttgcttcatgaatctgggtgctcctgtattgggggcgtgtatatttaggatagttagctcttcttgttgaattgatccctttaccattatgtaatggccttctttgtctcctttgaactttgttgatttaaagtctgttttatcagagactaggattgcaatccctgctttttttttgctttccatttgcttgttagatcttcctccatccctttattttgagccaatgagtgtctttgcatgtgagatgggtctcctgaatacagcacaccaatgggtcttgactctttatccaatttgccagtctgtgtcttttaattggggcatttagcccatttacatttaaggttaatattgctatgtgtgaatttgatcctgtcattatgatcctagttggttattttgcccgttaactgatgcagtttcttcatagcgtcagtagtctttacaatttggcatgtttttgcagtggctggtactggttgttcctttccatgtttagtgcttccttcaggagctcttgtaaggcaggcctggtggtgacaaaatctctgcatttgcttgtctgtaaaggattttatttctcgttcacttatgaagcttagtttggctggatatgaaattctgggttgaaaatactttttttaaagaatgttgaatattggctcccactcttttctggcttgtaggatttctgcagagagatctgctgttagtctgatgggcttccctttgtgggtaacccgacctttctctctggctgccctttccttcatttcaatcttggtggatctgatgattatgtgtcttggggttgctcttctcgaggagtatctttgtggtgttctctgtatttcctgaatttgaatgttggtctgccttgctaggttggggaagttctcctggataatatcctgaagagtgttttctaacttggttctattctccccatcactttcaggtacaccaatcaaacgtagatttggtcttttcacatagtcccatatttcttggaggcttggttcatttcttttcactcttttttctctaatcttgtcttctcgctttatttcattaatttgatcttcaatcactgatatcctttcttctgcttgattgaatcggctgtcgaagcttgtgtatacttcacaaaattctcgttctgtggtttttagctccatcaggtcatttaagctcttctctacactggttattctagccattagtctaacatttttttcaaggtttttagcttccttgtgatgggttagaacatgctcctttagctcggagaagtttgttattaccgaccttctgaagcctacttctgtcaattcatcaaactcattctccatccagttttgttcccttgctggtgaggagttgtgatcctttggaggagaagaggtgttctggtttttggaattttcagcctttctgctatggtttctccccatcattgtggttttatctacctttggtctttgatgttggtgacctacggatggggttttggtgtgggtgtcctttttgttgatgttgatgctattcctttctgtttgttagttttccttctaacagacaggcccctcagctgcaggtctgttggagtttgctggaggtccactccaggccctgtttgcctgggcatcaccagcagaggctgcagaacagcaaatattgctgcctgatccttcctctggaaacatcgtcccagagcacgaaggtgtctgcctgtatgaggtgtttgttggcccctactgggaggtgtctcccagtcaggctacatgggggtcagggacccacttgaggcagtctgttcattatcggagcttgaatgccgtaccgggagaaccactgctctcttcagagctgtcaggcacgtatgtttaaatctggagaagctgtctgctgccttttgttcagatgtgcccttcccccagaggtggaatctagagaggcagtaggccttgctgagctgcagtgggctctgcccagttcgagcttccctgctgctttgtttacactgtgagcatagaaccacctactctagcctcagcagtggtggacacccctcccccagccaagctcctgcatcccaggtcgatttcagagtgctgcgctagcagtgagcaaggccccatgggcgtgggacccgctgagccaggcacaggagagaatctcctggtctgctggttgtgaagactgtgggaaaagtgcagtatttgggcaggagtgtactgctccttcaggtacagtcactcatggcttcctttggcttggaaagggaagtcccccgaccccttgtgcttcccaggtgaggcaacaccccgccctgcttcggcttgccctccgtgggctgcacccactgtccagcaagtcccagtgagatgaactaggtacctcagttggaaatgcagaaatcacctgtcttctgtgtcgatctcactgggagctgtagactggagctgttcctattcggccattttggaagcatcccttgttttttgaggtggagtcttgctctgtcgcccaggctgacgtgcatcggcacaatctcggcccactgcaacctttgcctcctggtttcaagcgattctcctacctcagcctccggagtagctgggattacaggcacctgccaccatgcctggctaattttttgtatttttagtggagatggggtttcaccacattggccaggctagtctcgaactcctgaccttgtgatccacccacctcagcctcctagagtgctgggatcacaggtgtcagccaccacgcccagccatattttcagatctccctctctttgccctaaaccactgtgcttaataagtagtttttagtggccagcagtctccatgtataacacattttagcaaaatggaaaatactatatgttttaaatttgaacgtgagattatactgaaataaaaatcatctaactgggattctttaaatagtaagattttcttttttgtatgtgggtttttttttaaccttattattatgactgtcatatatagaaatggctgtttttcagttacagtcagtgaatgtatcaaatgctgccttatccaaataataaaagtaaattattaataagtcacaatttaatgaagattgatgttagttgatctttatattcttgaaatcagccatatggttgtgtgtgtatgtatatatttttaaaggtacataaagataataagctcatctctgaaaatttttacatttggcataagaataactggataattaagcatcttattctctggcctgtgtctttacagttaaaggtagatttactcacctctccttttttgtttttctaagttcatcttttttgctgtttcaagacagaggcccattttagctttctcgcatatccttttgtttgtactttggaagcctcacctgcttaattgttgagtttttatccgtggtcttttagagggggatatgtagggtagaagctttcacaggttcttgtttgcacttggcccctgactgttttgaggaatctccctcactgactcacagcatggcaaggtttcagatctctttctgccacacagcagttctgaggcagctggaaagatatccagatgcttagattgtcaggccaggcttgagatatacaaactattgagccttatctgtgaccttgcttaggtgaaggcatcagagcccctgcaccaacatgcataggcctctgcatgtgtgcggggctgggtgttgaggtctgagcacaagtgtagctggagaggtgagcttgatgtggcgacgggtatgagcaggttttcttcagacttctgtgagtttacctagttccaggatttaaaggcacagagactttagaattaaaatagaatcattttctttttctaaatagcaacactaggaataaaaaataataattccacattcttgacaggtaatgttttttcttgtcttctaatccttatttattccatactcatttttatacataattgaaatgtattatgcattggatttttcttttgcattatattatagacgatttttcatgtaactccttactgttccattttatatgttttgtctggtttaagactttatctgcaaaccgggaaactgtctctacaaaaagaaaaacaaaaatagttggccgcagtggcatgcgtctgtggtcccagctactcggggctgaggtgggaggattgcttgagccttgggaggttgaggctgcaaagagccatgatcatgccattgcactccagcatgggtgacagactttatactgtctgttttgggtgatttgataatgatatgccctgatgtagtttttttatatcttgtgtttcttgtgcctgggtttattgaggttgggtctgtggcttcatagtatttttaaagtttggaaaattttaggccattctttctttctttctttcttttttttttttttgagacagtgtctcgctctgtcgcctgcgttggagtgcagtgacactatcttggctcactgcaagctctgcctcctgggttcacgccattctcctgcctcagcctcctgagtagctgggactacaggcgcctgccaccacgcctggctaattttttgtatttttagtagagacgaggtttcactgtgttagccaggatggtctcaatctcctgacctcgtgatctgcccgcctgggcctcccaaagtgctgggattacaggcgtgagccactgcacccagctaggccattatttcttcaaagattttttttctgccctgcctccctccttttttccctctcttaaaggggctgtgatttcctgaatgattgcttagtgttgtcccatagcttactgatgctcttttcagtgtttgattgttttatgtgttttctgttttgtatagtttctattattgtgttttcaagttctctgatcttttcttctacagtgtctactctgttgttaatctgttaatctgttgttaatcctgtccagcgtatttttttttttgtttttgaaacagtctcactctgttgcccaggctggagtttagtggtgcgatatcagctcactgcaacctccacctcccaggctcaagcaattcttctgcctcagcctcccgagtagctgggactataggcacgtgccaccacacctggctaatttgtgtatttttattagagatggggtttcaccatgttggccaaactggccttgaactcctgacctcaggtgattcatccgcctcggtctcccaaagtgttgggattataggcatgagccaccgtgtctggcccctgttcagtgtatatcactaattttgtttttatctctagaagtttgatttaggtcttttaaaaatgtctccctgtgtttctgtttagctttgtgaacacaattgtaataactgttttaatatccttctctgctagttctaagatcttctaataacttcccagttcttggtgtttctcattggttgattgatactcctcgttttgggttgtattttcctgcctctttgtatggctgccaattttttattggatgcccaaccttgtgaattttactttgttggatgctatatatttttgtgttcccatagatcttcttgagctttgttctgaggttagttgagttacatatagatggtttactcttttgggtcttgctttataatttgtcagatgggttggagcagtgcttagtttaggactaattttttttttggactaattattcctctttaggaataattaggtaccatgcttaggaggcaagaccatcctgagtactctacctaatgaaccagaaagtttgggttttccagtccgcctgctgagaacagtgactttctagccctgtgtgagcgctgagctctgctccttctaatcctttccaatgcttctttccctggcctcagggagttttctcacacacatatctctgctgagtactcgagagggaccttccccagatctccagagctctctctgtcttgttttctcttctctggtgctctgtcttatgaactgtggctgtcttggtctccttagattctcagcacctcttcaattcagagggttgcctgtccctcctccttgtgccacagcctaggaactctctcaaagcagcgagttggggcagccatagggctgacttagtctctcgtctcccagggatcactgtccttcattgctcatgtccagtgtcttgaggactctgggttttgtctgttttgttttttggtttgctttggttgtctcaggcaggagggtaaacccagtccctcaccctcattgtgctcagtagtggaagtctcactctattacattagatattagtatttgtagcagagccctggttccctggtacttggggagctcttgaaaggccagaaacagcatgctttctcaccttttccagggcttcagtttctggtgcacatcaagcattccatacacatttgttaaagtcctttgttagacaagtagtgattcacaggttctatttgtaattttttcagttaacatgtattgggtatctgctgggagctagtaaaaacaaaaagtggtgtgtgacaaattcaattctgacaagaacaaccttaaacacttagaatatactttgagcatatcagaattttaaaaatgtgtggcccttgagtatttgaaaccaacaagaatctattgcttattagtagaggatattttgttaaacaagtggagagagaggcattttcagtctaattggtgttggcttttagcagctgatggaaaccagttcgtgattagccaggcagtggtgaaacaggctgtgcattctgaatgcctaggtatctaggcattcagaatggtggcgctctttgagttagcatcttcttctttcttgattcttttttttttttttttgagatggactttcgctcttgttgcccaggtaacaactccagtgcaatggcgccatctcggctcactgtaacctctgcctccctggttcaagcgattctcctgcctcagcctctcaagtagctgggattacaggtgtgcgccaccacgcctggctaattttgtatttttggtagagatggggtttcactatattggtcaggctggtcttgaactcctgacctcaagtgatgcacctgcctcgatctcccaaaatgctgggattacaggcgtgagccaccactcccagccccttcttgattcttgaaaaggacattgggtgctgtacatctcgttatagatgttgataaaaatgcttgtgagaagagtaacattaaggtagttatttggtcatttttgcagattattttaagacaattctaggactgatttgtggtaaatcacacattgctgtatcatagttgtgttcactgaacatattcaggggctctacagatgcagggctcttagctgctttgcacacttctgaattcctgccctgcgaacaggactggatacctaatagacaacaggtacttgataacagtttattgaattaatgagtgaatgaacagatacataaatgcatgaaagaatggttgtaatgtatataacttggatttcaagactttttactgactgttcaaaataagaaattgaaaactttcctctgattttcctctactatttacacaatttaaatggaagttatcttgtaccttcaatttctgtctaggattcgtacaataacgggtcatctctgagtcgcttaatgtctcacttgtctttctacagtgtgttgaagagatcctaggatacctgaaatcctgctttagtcgagaaccaatgatggcaactgtttgtgttcaacaagtaagagcttcattcttttcctcttctgttaagacgttcgggtatgacagcaaaacgctgctactccttaagaggcaggcgctgttggcataatcagctgggaggattgtggggtccagcgcagcactttttggctcagtccatgattgagccaagaggccatccttcccttcactccccaggaggacgaggtctgtcactgtggagggcagaggacaccagaagctcctctgcaacctcgctagttaacttccagtccctcggagtttctgtttagaatgctcaatctcatttagaattgcaaggaaacccaaaacgcctatttaaggtacaaacagcacttcatacaatatctcatgaggtattaatagtgattcacaggaagaatttcacgctgtgagtctttgctaacatatccagttatttacagatggatttgatatttgtgtgggagattcttaaaagtgttgttcacgccacattgttgatgcctcatttttttcactgtagttgttgaagactctctttggcacaaacttggcctcccagtttgatggcttatcttccaaccccagcaagtcacaaggccgagcacagcgccttggctcctccagtgtgaggccaggcttgtaccactactgcttcatggccccgtacacccacttcacccaggccctcgctgacgccagcctgaggaacatggtgcaggcggagcaggagaacgacacctcggggtaacagttgtggcaagaatgctgtcgttggtggaagcacgaaagagcaagcaggaaatactttgtaaaagaataaaaacgaaaaatgttagcgaacatcttctaatagtctgctgtattcagagaactctaggagatatatatggttgatgcaaagatgatttaaggcatagcccggccttccaagaagtgtgtggccagtgagtgagatgggcttgggacttacacatctcagaggtgggggtagaggaggaggaacactgagtgggctgagaagcagccagctctcattgccaaagtgtgtcagcaaaccagaatgcagttcataatgtccccacccattcaaagcacaggacctgtagagtggtgtggcatgtgttggtggcacttttcaggcctgtaacaaggatgaaagaacagcttcatagcagcacagtagtgctggtgttcagaggtgtgtgaaggccatagaagcatcttggatatattaccttgtgttttgtcagctttatgactagaagtctcttttcacttaaatttgttttttttttttttgagacggagtcttgctctgtcgcccaggctggagtgcagtggtgcaatctcagctcactgcaagctctgcatcctgggttcatgccattctcctgcctcagcctcccgagtagctgggactacaggcgcctgccatcacgcctggctaacttttttttgtatttttagtagagacggggtttcaccatgttagccaggatggtctcgatctcctgacctcgtgatctgcccgtcccggcctcccaaagtgctgggattacaggcgtgagccaccgcgcccggcctcttttcacttaaatttatgtttgtgtttttaatgcctagtatacaggacttcttaaattgccttaagtatgaacaggtatttgagttgctaatctgtatagtagcaataatagaatcccttgtttttccttttataaatttagcgattaaatagctacaattaaaacactagagtcaggagtcaaggaaaatacccatgttccaggctgtatgttagtgatgtacttactatatattggagtttcaggagtaagtctgtttcaatgctttctgtaaccatttggggtattaataagcatgtgagtgtgtgcatgtttgggttaatttcatatatgtttcttagaagggatatcattgatgtaaatattttaaaggcttgtcctccaaaaaaatcatgtaatttcttctaaattactgatcttttaaatgaccttcacctttctctcaaatctcacttaagactgggctgagtagtcagtttcctgtagcagaaaaaagctcagacttgagtagccttctgcgagtgaggagacttgatggctgtcaggcagctgtaaactctaaatagagtgtcattatctgaagagggcgatgctgccacactgagtggcctttcaagttgtttctcaatctgacacgttctgatcgtgtgaatgtgaaattggtttgagcaggagtatatctgagtgcagaggagattatttaaagatattctcattctctgcttcccttttattcccatttggcagatggtttgatgtcctccagaaagtgtctacccagttgaagacaaacctcacgagtgtcacaaagaaccgtgcagataaggtaaatggtgccgtttgtggcatgtgaactcaggcgtgtcagtgctagagaggaaactggagctgagactttccaggtattttgcttgaagcttttagttgaaggcttacttatggattctttctttctttttttcttttttatagaatgctattcataatcacattcgtttgtttgaacctcttgttataaaagctttaaaacagtacacgactacaacatgtgtgcagttacagaagcaggttttagatttgctggcgcagctggttcagttacgggttaattactgtcttctggattcagatcaggtttgtcacttttatctttcatccatcatacctgttcctaatttagtacaaattaccctaaaagacactgaaatctactttaaagaaatgtggtctgcatgtttccctcatcagttgctgctgcttatctttttcatgcacctagctggtgcagaaggcctggggcatagccagcctcagcaagtcagcatccttgccccagctccctggactcaaggctaacctggggttggctgttagggatttccaaaggtttgtcccatccacttgcctcccctccaaaataagtttgaatttaaattgtgagatacaattaagatttattgtttggggaacatttttgcaaaatctagagttagtttaaacagattatcaattattaccataattgatcatctgcagtttcaagctatctaacaggttcacttacctctttaaaaaggaatggaatttagcaggacagtaactgagacccgtgctcctggagtccatgtgggagctgtgtggctctgcacaagcatttgcacgcttcccctcttgactgcattaccttcctcctatagttgctgtgggcaccagattctggctagtcctgtcccttcatgatgcacattttcctcaagattcgtcccagttaaatcactgcagatgaaactgccttttcatcgtcaaaatttaactgtcatttttgagccgtgatcttgggctactttcttatgtggggtaggaatatttgtgagttagaaatattacacttctctatttccttctagacgtaaatctgttaatcctgtcagcactgttactcacctgaaagggtctgtttccctaggagaactgagggcactcggtcaacactgattttccacagtgggtattggggtggtatctgcttgttttttttgttgttgttgtttgtttttttttgttttttttttgagatggagtctcgctctgtcacccaggctggagtgcaggggtgcgatctcggctcactgccagctccgcctcagaggttcacgccattctcctgcctcagcctcccgagtagctgggactacaggcacccaccactacgccaggctaattttttgtatttttagtagagacgaggtttcactgtgttagccaggatggtctccatctcctgacctcgtgatctgcccgcctcggcctcccaaagtgctgggatgacaggcgtgagccaccgcgcccggcctggggtctgcttttaatgaaggaggcatcaaggggtgggctttgcgttggcctgatgctttcatctttctttcacaaaacctgtccgaagaaaatccgtctaaatgggccattgctctcctcaggaaatagtcattgggaacttcttttcctttcctttgacactaggaggctgactggggagaagccctggtctatggctgtgggcagcaggggctgagaggagcaggctctcaggggggcacgggtaccccaagggaagccagagccctgatttgttccattctagtaagaacaaagactgctctggtttcatgtttgttctgattgcctttcatcaaccggtcccctttctcccagttcttaagattcagtacagtgacagttttatgaacaagaatagaacactagaacagacaaaccattgaactctatgctgataaagatttattgagctcctgctgtatgtttgcattctgcccagaggctctgagaaaaccaggccatatgctccatgctttatccatggaagctccccgtcaggttgggaaagctgacagctgcagggaatacagtgtgacacaaaactggctcccatgcagcccttacgtgtcgcctctcagatggttgggggacgaaggtcgactcctttgggtatcttattactaaaccagtttcagggaatctgtgccaccctatctgccattaacgtgaacagatgagtccccaaggtgtaattttgggtattgtctgatgtctcttggaatttattatttgtttttccaatgagatttcacctcagggtatagtaaagttgttgaggggattcctggatgtgttctgcaattatctaggctgatttcagaatagagttatgcttatagtcaaatttatcagctgtcaagaattttatttaaaatttatgcagataagcaggaggaaaagaagcctggtttttacattttaatcctattattgatgtgaaattttattttccttcctgtaggtgtttattggctttgtattgaaacagtttgaatacattgaagtgggccagttcaggtaatagcattttattattttagatttttttcttcttcttgtgtacttacatgtaatttaggttattaagtgaatgtttaaactactgttaggcatttttgctgttttctttaaatggaaatctgactaacatactgtgcatttttgcttctcttaaaaattaatgtatatctcaagacttgtttggaagtagttatgtatctgaaaattccatatgttgtcagtattcattgcacatttcaaagcatttaattgtgttgacagatggtggaatgaaatcttgtggtggagcactagtttttaaatcttcttagagaaagcagttttatataatgttgtctttagtaattattatgcatttgtattctctgcagctttttcttgctagatgttgaggttttaatacttcttgctagtccattacaggtttataattattaaaagttaaaattcttttagtacctaaaatgcttaataaacattgtaattaggaaaatttagtgcagaaggaaagtgttcccagattccctggggtctggaaacatagtgtttattctaattacatgacacctccactgtgttttggggcaagttactgtttctcttttgagtttcaatttcttcaagagcaaagaggcagaggagagctaggaagatcgtagctgctgtgcccctgtgccgtcgggtgccttctacctgctgcctccgaacctttacacatgtccctgctctgcgcgagggcacagatgggatgcactgtggcaggggtggggttagagtagatcacggacacctgttagcttgatgtgtgcttgctgtcaaggttgaatcatgaattattttatgttgcttatattgatatgtatcttaattttaaaagaaaggtctaaatggatgtttttgtttttagggaatcagaggcaatcattccaaacatctttttcttcttggtattactatcttatgaacgctatcattcaaaacagatcattggaattcctaaaatcattcagctctgtgatggcatcatggccagtggaaggaaggctgtgacacatggtaacgggacacacctttcactgtcgtcttcggtgtcgtgatgtgcttggcagtgttcgttttcatatacccactttgaacgttgtcagtggcagccatgtgcttctcaggctctgcatgtgtgtctgtgtatgtgaaggtactggttagagacgtttcaaaagagaagagagcatattctttactctcagcaatttgtaatcttctcagggaaaaaaattcaagaaacagtaagataacctaaggtacagatagattctgaatataaagttcctgttcattcacatgaaacgctaaaagttcttcacttgatcttagccaaaaggccaagaagcgatgcaacactaaaaattcttaaatcgaacttgccgtgaattaaattttgatctctcatccagtggtattggagatatagtttgacttgggttcagggctttctgttttgcctgatgattttgctggagcttaaataaggaacccaggagatggccagctgtgcaagcccccagcctgtggaaggagctagtgtggttttatgaatgagttgcaaatctttctttgagctttttgaactgatcttccagcattgccctattgacccctccctgactcctttgctggaatctgtaggcttttgaactttgacagggacacatcctaagacccttgcaaactcccagatgtgagaatggcactactacttagagtcttttcgactcagcgtgtgtgcagaagagcatcaaccgggctgtgttgcgaggcagggccttggctgacctctcagtgtttacatagctaagccagttagtgtttgccacggcctcacaagggcttcagattcacacagccaaagtatagattattaaaggcataggtgtttggtttcctggacttggagggtctttggacagaaaatcagtaggcaaccacacccagtactttgtgctgggaagcttggtcatctgtgagagggtcagagagtatacccatgcgtgcatgccaccgaagggtcagtgagtattcctgtgtgtgcatgtctcagggccggagagagtatgtgtcactgagaggtcagagtgtttgtgtgtgtgtcaaagagggttgcattgtgcccttcactgaggggtcagagggtgcctcgcgtgtgtgtgtgtgtacgtgtgtgtgtgtcactgaggggtcagagtgtgcctgtgtgtgtgcttgtgtgtgcgtacatgtcactgaggggtcagagtgtgcctctgtgtgtgtgctcatgtgtgtgcatacgtgtcactgaggggtcagagtgtgcctctgtgtgtgctcatttgtgagcgtatgtgtcactgagggggtcagagtgtgcctctgtgtgtgtgctcatgtgtgagcgtatgtgtcactgagggggtcagagtgtgcctctgtgtgtgtgctcatgtgtgagcgtatgtgtcactgaggggtcagtgttcctatgtgctcatgacattgagggtcagagtgtgcctgtgtgccaatgaaaggcatttcttatatttttttatatgtggtcatagtagaccagttaatttattttgactcctgtgttagaccaaaataagacttgggggaaagtcccttatctatctaatgacagagtgagtttacttaaaaaagcataataatccagtggctttgactaaatgtattatgtggaagtctttattgtcttttcagatgaatcaagtagattattcttgagaccaggaatgttgctgttttggttatttggaaagttttatcattttcaaattgacttttgaatttgagtcaccttttttcagaagtggtgttaaattataggagccctaggttttttttctttttttagaagtcatcacaaaatgatcagtgttcagaggaagagctttgaccttccacatggtataatgattgataaccttaattcatctcttaccataaaccaagtatgtgtaagggttttctttatttcttgaaagcattttgtagatgttgagagcagttttccaaatgtaatttccatgaaatgcctgataagggtacccttttgtccccacagccataccggctctgcagcccatagtccacgacctctttgtattaagaggaacaaataaagctgatgcaggaaaagagcttgaaacccaaaaagaggtggtggtgtcaatgttactgagactcatccagtaccatcaggtaagaggaatgtatgttggaactgtcgtggatactttattgacccgtgcagatggaaggaagtgccatgtggtaacgctcactgttaactgtgttactttgaaccaggtttgggctttctggggcctgggtagatgccggtgcagggggatggggagggaggcggggggtgggggggtgtggtggagttggggaggtgcagtggcaggaggtgttgttggtgtgtatcctttttttttttttgagatggagtctctctccgtcgcccaggctggagtgtggtggcacgatcttggctcattgcaagctccacctcccgggtttaagcaattctcctgcctccacctcccgagtagctgggattacaggcatgcaccaccatgcccagcaaatttttttttttgtatttttagtagagatggggtttcaccatgatggccaagctgtttcgaactcctgacctcaagtgatcctcctgccttggcctcccaaagtgctaggattacaggcgtgagccaccatgcccagcctggtgtttatctttaaagtgggcacagccacaggagttcacctgactcctggtctgagagtcacgagatcgttcaagatagtgaggccctcttttccaaaacgaggaccaaaaatcaattgacagtgttggtcaagatggtagaaaccttaaaatgatagaaatctcaactctgaaataaaaactttatttgtatatttatttaccactattttgacatagggctaaggtctttttctttgagctgatttctggttttgttttcttaaagtggcataagaattcaaagacattttgaggaaggctgagtgcagaaatctctctttttaaatgacttctcctttcttttaacttgcactgttgtctagccctcacttattttgtcaattctttttagctgtttgtctttgaatcttcataaagccatagcttttctcataagaagcagcactttctttgttcattcatattttaatgaacccctgtagtatttaattaaatacttaatgcctaattaaatcacataattgcaatgcaaaagtacatgtatcataaagaggtctgaaaatgagcaactggcaagcaggtggtggcaggcagagctgcttgggtgggtgggtgtcatggagaggagttcatcagccacatgttcagtgagctctggatatgtctgtttagaaatgatcactaataaacttgtgctcaaccatgtatacctctgggaagcaggtgctcttcagtagattgcctctgcagagaacacagaattgaagtgaatgtccacaaaggcaatgagccacctgcagaatagtttagtcaaggctgtgtttgaagtttgccaaagattaatatacatttgattttcatgttgtgccttttctctgattgtgaaatattacaaattctatacaaataacaatgatggcaaatcctcctgagcaaagtgtgcaccttgtatgtgccctagaggaacttgtgtttcgttctgattcccctacatttctcatgtcatagagtgggggttgcattagtgtccccctgtcctcgctgggatcacatctgtttggatcctagagtcttccagctgaactgggacaagtataacagacggacacgtaggggtggaaaggcgtctcttggcagcagactttctaattgtgcacgctcttataggtgttggagatgttcattcttgtcctgcagcagtgccacaaggagaatgaagacaagtggaagcgactgtctcgacagatagctgacatcatcctcccaatgttagccaaacagcaggtttgtccccgcagccttggcttgttgttgcatagtgatggtagcttaaggtccttgtgaaaggtgggtggctggaatcagctcttccttcagtcctaatctgtgccttgatagcagttctccgtgctagtcatgggacagctgacttcatttcttctcacaatgccatctcaggttggtattgcccacctactttacaggggggatcccacagctccgagaggttatggaggtgatcaggcagcacacagctttagagtgctggggtgagggcgggccaaggctaactctaaagcccgaacccttacctcctacactgcctcctgcattctggtcaacccagtgttttatttggtggttagatttttgtttttgttaccttactgcttgtaatttagcagttttcctttcctttcccttcctttcctttccgacagggtctcactctgtcacccaggctagagtgcagtcgtgtaatctcactgcaacaacctctgcctcccaggttcaaccaattctcccacctcagcctcctgagtagcaaggaccacaggtgtgcaccactacgcctggctagttttttgtatttttagtagagatgaggtctcgctgtgttgcccaggctggttttaaactcctgggcgcaagtgatccaccaaccttggcctgccaaagtgctggcattacaggtgtgagccacctcgcctggcctattcatcactaatcagaatttctatgatcaaatgacatgaatcattgtttccacaactgcagtggaaggaaatggcctggcagtgccagtttcagaagcagcctgcccccagtcaggcacaggccactgtgcccccagtgtagcagcacctctgtagctcacagagaagggtggtggggacctccttgaggcagctctgccagaaaatctcatgagctgcctggcacagcttgaggttgccttttaagtggactcagcaaatacatgtttgttcatcttgattatacacaataaacaactactctgtatagtacgagtagtccgtggtttttggcatttgatttaaacttagaggcatgtgatattgatgttactgccttcatgactgcacccccattctgatttcataatggaatgttatcttgagaccagttagacaacaggacagggatcttggcttctggtgagattgacagcagttttagtgtggtcagggtctccctgcctacagatggttttagaatggtgccctggaagctttatcccattcttttctgtgcgtaatctgagtagagtggagatcgaaggcctgaatacatagtaaatacctgacttaatatctgccgcaatggaaattgtgtgatacaacatttatgaaacgcttagtgcagcacctgccaggtagctcaccacaggtgcatgttgcattcagaagtagtgctagatactatcctgttactggcagtgcatacatcagtgatcaaagcagattaaagaaagaccccctgccttcttggagtgaagattttgttgggatgcgggtaaggggacagacaatagaaaagcaagtgagtgaagtctataccatggcggctgatcaggaacaccgtacagaagaatccaggagggaagagagttaggtggtgtctgcggtgggagtggcattgttcagctggtgatgagaagaagctttggtgatctggtgacatttgagtgaatttgcagaaaggaaagatacaagcctaggagatacctggggaaggaacattccaggcagagcaaatagcagtgcaaaggccctggcggggggcggacatgctgttagggtacaagcaatgagggtggaggagtggggcagccatggggagggaagggagtgaggcctggtggggtgaggccagtgtggaggagccttgagagggtttgcgctgatgtggtgtaggttttagcaggatcattcttattcctgagttgagaatagccttgagggggaggtgagggcagagcagggccacccatgtgagacccggcactggagtggaatggcccaagtcagcatcccttggcagcatgaaagcaaaaccagcaaggtttgctggtggcttagatgtggcatgtgagagagagcagggctttgggggtgatttcagggtgaggacagggtggctgtggacaaggtagggcagacattgggggcagcaggaggtcagagcctgtctggatgtagcagttgagaccccataggtgcctaatgaggtgaggccagcatcaggtgtatgagcctggagttgtcgagagactgtggggcagggggtcagcatctgagatgtccactcacagtggacccagactggctggagaggaggaggagcttgaataccgagcctgctgagtcccagctccaaggtcaggtaggtgaggggagccagtgctggggcagggggagtaggcaggtgtggggttcctaaagccaagattttttttaaggcattttgtgcaggagggcgacatctgctgtcagcaccttgggaacttggcccaggtttggcagcaccgagggcactgatgagtgcttttggaggagcaaagggagccaaaccctaatgggaatgtgttcctgaaaggacaggagagagacttgggaaaaggttttacttgaagagggaacggagaaatagggcagtagccagaggaggagaggagtcggcaatgggttaagttggcagaaatgaaggcctgtttacgcactgagggcagaagcaacagggaggatcagttcatgacacaggagacacaaatcgccgttgtggtgttcacagacatgggttaggattggctgcatggatgacagagcactgtgggttctcccagagttgctggggaggaggcagagttggtgagcacaggcgagggtccaggatgcaggaatcctggagctcaagtcagttgttcccttgttgtaagatgtggccagtgttgtgagcttcacatctgtgccttgaaaaacaccacatctgtttgcagagttgtttactatgtatacacactcagtagaaacaaaaattggaaacagtcagtgcccaccatcaataagtaatggttgaacacactgtggtataagcttagactattttagcttgggctattttgcatgattaaaaatgttctggccaggtgtggtggctcatgcctgtaatcccagcactttgggaggccaaggcaggcagattgcttgagctcaggagtttgagaccagcctgggcaacatggtgaaaccctgtctctactagaaatacaaaaagtagctgggtgtggtggtgtgcgcctgtagtcctggctaactcaggaggctgaggtgggaggatcacttgagcccattcgtgcgccactgcactcctggggcacagagtgagactctgttagaaagagagagagagaaagaagagagagggagggaggaaggaaggaaggaaataaatggaagaaatggaagggaggaaggggagggaggaaggaagaaaggaagttcagccagttgccttgggagttctccattgcactgggttaagtgagaagagcagagacgtttatgatttttcaaaacaactaaaacaaaacctctgtgggtgagggggcaaggatatggctataggaacatggggcagattaagaaagggatatacacacaccacttagcatttgttacaactgttgtgggagggatggagtgcagaaaaagaaaaaaaaaagtgcacaccatcccatgtatgtgtatacaaagggacgcttggaagactggtccccaaaatgttggtaatgattgtgtcagggtgctgcagtgctagttgattttttttcacacttttgtatatttgagtcttttacagaaagcatttattatttatgtaataaaaatctaaatgacaagatttctgttatgggaaaaatgtagctatacagtgttgttgtaaaaatgtttgcttggttcaccactgaacttaaaatgcttttaaatgagggaaggtgacgatgagatgattatgatgatttgcccttgagttacatagctggtgtacaggaagctgtcgtttcttttggcttacgtagaaatgtttgtggtgtctaattccacagatgcacattgactctcatgaagcccttggagtgttaaatacattatttgagattttggccccttcctccctccgtccggtagacatgcttttacggagtatgttcgtcactccaaacacaatggtgagtctctcgcctggctcagcagatgaatctggacggcttgttcaggctctgattactgggaccacccccagaatgtctgagtcagtcagtttgggtagggcttcttgagagtttgcttttttttttttttttttttttggtgtgggggtggtgcggaacagagtctcactctgtcgcccaggctggagtacagtgtcatgatctcggctcactgcaagctctgccttccagcttcacaccattctcctgcctcagcctcccgagttgctgggactacaagcgcccaccaccacgcccggctaatttttttgtatttttagtagagatggggtttcaccgtgttagccaggatggtcttgatctcctgacctcgtgacccgcccatctcagcctcccaaagtgctgggattacaggcgtgagccaccgcacccggcctttttattttttttggagatggagccttgctctgtcacccaggctggagtacagtggcgctacctcgactcactgcaacctccgcctcccgggttcaagcaattttcctgcctcagcctcccgagtagctgggactacaggtgcgtgccactgtgcccggctaattttttgtatttttagtagagacggggtttcactgtgttagccaggatggtcgcgatctcctgaccttgtgatccgcccgcctcggcctcccaaagtgttgggattacaggtggctctcgcaccaagccaagagtttgcatttttagcaaattcccaggtgaaactaatgcctgcttttctgggagcacactttgggactcagtgatagagaggtttattggtaggatagtaaaataggagttattttctttcacaaaattggcaattgggggaaatttaatcttccttttttcttcagctgtgacttatgtattatgtttattttaggcgtccgtgagcactgttcaactgtggatatcgggaattctggccattttgagggttctgatttcccagtcaactgaagatattgttctttctcgtattcaggagctctccttctctccgtatttaatctcctgtacagtaattaataggttaagagatggggacagtacttcaacgctagaagaacacagtgaagggaaacaaataaagaatttgccagaagaaacattttcaaggtatgctttctatctgagcctataactaacccatgccttttgggaagtcacgtgatgtttcacagtcagtaagtctggaataatacctggtcttgcttcacttctgagttgggtaaagaagtctgtatcagtgtaattttctaatccgtcctgcattatctatggctcttggttcatacctgtcttgaagttctgtcatgttctgtctcttgtcctcagtagagatgctacagcagtggctcgcctcaggcagggcagggcagtggggtggctgtcctgggggcaggcagtaggggcacgctgacgtcagggaagttgaaacccaagagaagccagtaaaagtgagtctcagattgtcaccatgtgctggcagttttacacgctgtcagtaataaaagtcttctccctgcagggcagcctgcctccaataaatacgtgtagtatcaaatcctgtcttccctcataaattgtttggaagctccccaaggacagtgatgaggcactcgtaagtgcttgctgcctagatgggtccctctccacctttgctagattctgagcattcactgagttagagctgcttctgcaaatgtgctgcttctgctaagtggctgtgacttcatgcagccttcacttggtttgtcatcagtggagatgccctgtgttgtcgaaggagataagcccagtaagcctgctgggcaccttttggtttgcaggttcagcaggcagcccatggctttccctgtgtcgcattgaagcagctggctaaaattgatgatacattaaattcctgtgacagatgatcagcttgtatttgtgtaatggtgtacagttcacaaagcttaaaaaaatgctacctgccatttcatcctcagtgaggaaggtgatacacagagagaccaagtgactgtgtccacggcgacggcgctctgcatttcactttagcggttaatgtactctacctatatttttactttatatttaccatatatcttttcatgtatacttggcgtaagtgctttatagtagtcacctaattcactgtcatcttttttgtttcttggaaggtttctattacaactggttggtattcttttagaagacattgttacaaaacagctgaaggtggaaatgagtgagcagcaacatactttctattgccaggaactaggcacactgctaatgtgtctgatccacatcttcaagtctggtaggtgaatcacattagtcttcctggagtgtctcgttccccattctgcactatacactctcagagtgtaggagctgtgctgcccggtagaaactctgccttgcccagtgtgccagttgaaaatatttgttgctgtaagagtacacctgataccatgtgacccagcagttccactcttgggtatatacccaaaagaatggaaagcagggtggtgaaaagatatttgcatgccagcattcatagcagcattattcacgatagctaaaatgtggaaccaactgaagtgtccctcgatggatgaatggataagcaaaatctggtgtatatttacagtggaatattattcagccttaaaaaaaggacattctgacacatgctacaacatgggtgacccttaaggacattatgctaaatgaaataagccagtcacaaaaggacaaatactatgtgattccacttacatgagggacctggagtagttaattcatagatatagaaagtagaatggtggttgccaggggctgcaggggaggggagttatttttacaagatgaagagagttattctagaaatgaatggtggtgatggttgtataacattatgaatgtacttaatgctactgaactgtacagttaaaaatagttaagaggaccaggtgtcatggctcatgcctgaaatccaagcactttgagaggccaaggcaggaggattgcttgagccaaggagtttgagaccagcctcagcaacatggtaggaccccatctgtacaaacaaactagccggggatagtggtgtgcatgtggtcccagctactcaggagactgaggctggaggatcgcttgagcccaggaggttaagtctctagtgagatgtgttcatgccactgcactccagcctcggctatagagtaagaccctgcctcaaaaaaacaaaacaaaacaagacaagagccaaaaatggttaagatgggccaatcacagtggcttatgcctgtaatcccaacactttgggaggtcaaggtaaaaggatcacttgaagccaggagcttgggaccagcctgagcaacatatcgagacccctatctctacaaagaaaatcaaaaactagctagatatggtgggcacatgcctgtagtcccagctacttgggaggctgaggtgggaggatctcttgagctcaggagttcgaggctgcagggagctattattgcactccagcctgggctacagaatgataccctgcctcttattaaaaaaaaatccaaaaaaaaaaaaaagtaaacctgagagcttcctcctcctgtgttaaatttggaggccaagatgtttttgttacttttacaaatgatcaaggacggtgaaggttgggcatggtagctcacacctgaaatcccagcactttgggaggctgaggcggggtgatcgcttgagcttgagaccagcctggacaacatagcaagagaccccatctccacaaaaataaaaaaataaaaaaaaatagccaggagtagtggcatgagcctgagcccaggaggtcaagctgtagtgagccatgatcatgccactgcactccagcctgggcgagatcgagaccatgtctctagagaaagaaaatgacaaggacagtgaacccaagaaagtcataagatgccagctgtgcagcaagcatggaaagcagccagtccaaattaggacagtgtgttttccaagaagaacgatcgtttgtaatgagaatgctttgctttaaataaatgactaaatagctagaagcctagttctaggggataggcacgtctttcttctctcaagaaaatagaaaggcaattctaatttctagtaacagcaaacagcattaagtcatggtccaaatatgaggcaaaccaaaatgtggcttgattgttcagcagttgatctgttggaagcccttgatattaaaaaggttctcctttaagcggcttaggagtcacgatcaaagacctatagaaagagatgccatccttctaggatccttggctctcttgggaactagattcagatagtcataatgtaaatactgcttgagctttctttctttctttctttctttctttttttttttgagacagagtttcactcttgttgcccatcctggagtgcaatggtgccatctcggctcaccgcaacctctgcctcccaggttcaagcaattctcctgcctcagcctcccgagtagctgggattacgggcatgcaccaccacgcctggctaattttttgtatttttagtagagacagggtttctccatgttgaggctggtctcgaactcctgacctcaggtgatccacccgcctcggcctcccaaagtgctgggattacaggtgtgagccaccgcacccggcccgagctttcatttttgaaatcaatgtatgactgaaacactgaagacttactgacttaattatggtttcagaacagaatgaaaatgtcttcggttctgatgaatataaaaggaaaactaaccaagttaatttggcaagtagatggtagagatagaggtggggagtggaaggggaactaaaatcttcacctagcattgttgggattatatggttacatcatctgaagttgacagaccaaaatatagaggcttcagaggtctccaaatagaactaaacatgtaattcagattgttaggaggtagtataaatgagctaaatctcatctttattacggtagagttaatgggtgatgtctaaagttgtctgaagtctataaatcatgacaaattatgatgtggtgattgtattcaacagtctttcagttgcagggataaaaccccagtttaaactagagtaagagaaagaatgtgttggtttaagctcctggaaagtgcaggcaagggtagttggtaggactgcatctagtgttgtaattctgtggtctgcattgtatatttatgcatctcagctctgctttcttcttttcatttatataatttttaaattttattttaaagatagggtctcactttgtcgcctaggctgaagtgcagtggcatgaagtgcagtgcgaggctcactctagcctcgaactcctgggctctagagttcttcctgcctcagccttctaagtagctgagacaataggcatgtaccaacatgcctggataggttttaaaatttttttgtagaaatggaagtcttgctgtgttgcccaggcgggtctttaactcttagcttcaggcgatcctcctgcctctgcctcccaaaatgctgaggttataggtgtcacccaccacgcccagtctcatctctgcttcctgtgttagttttgttctctggtgggctgttttcacatgaccgaagatgacctctagcaggctgtgttctcagcccctcaagtaggcctatgtgattggccttgcatgagtaatatgggtgaccataaacccctgaatgctctggtccacatgggccaaatgggagactggacagcattccattgatgaggaggtggggctggtctccgggagtaagggagaggagcacatgcagtaactgatggtctgctgcaagggatagcagcacagcagttagaattttggaggtaactaccagaactgaaaacagaaatgataacaagtagttgccttaaaaagggatgggagcagggtgcttttgtgatcaaagctcctttctcttactggatttttgtacacattttgcatacatatcttagagtaaaagatagcattttcagccttggtccatttgaggatactcttggcgtggcccgcctccatgctagcaggctctggttgtgccaagttcagttgagcatcctggctcttgcctgcacggaacttccagtcagtgcgtcagtatcacaagtcttgatatttcctatgaagaagaacagtagtgcagtgacagacgaaatgggtgggcaggcagaggcaggatttctgagggagagaagtagctagctttttgcagagaagagttccggcacccaagagagcagctgagagtacaggcaggcaggcaggatgccggtagggcccggccgcacggcgccacagaatcctggagaaaggggcctcttcatggcctctgcattcagctgctgtcaccctccgcacaggccatggccaaaatttaattttcatagtggactctagtttttgagccttacttgctattattgaaataattttcttgtttctttttaaagatcttcggattatgcttcactgaccactgtaataagtttaaagttgagaaaatatggcttgttaatgaatgataggtcaattttagtatgttggtcattttaatattttgccaccagttggtttggatttgatgccaggaggagacagcctcatttctaaggactagtcttgcctttgtgggataagggtggtgtgttctgtgtccttctacatgtccgagcgatctctgtgcagctcaaatgtggtcactgtcttattgcgctgatttcctctccttccatctcacaattgaggcaaaatattgttactgttgaagtgttgtccaataggacttccagcagagacaggatgtctgcactgtctaatttagttgcctttagccacatgtggtgttctgtacctgaaatgtggctggtctgattggatagcttaatttataattttatttaattttaattaacttaaatttaaacagctctgtgtggatagtggctcctgtatgagacagtgcaggtctgttgagaagcagctttactggtgggagtggagggcttggagagggcacgtgggtttcctgctggtatcttttgaccttatttaatctgcccaacatttgcaagtaagttgtgtgtgtgtgtatatataaatgtgtgtttctgtcttcttgtttcctttgactgcatttatttgaaagacactaggtggcagaattactgtatttgattggtttcaagataagagttgaaataattcatctcgtgtttttatataagtaaggtgtgtttagcatgtaaaattggtaatatgtattcacgtactgcttaaacaaaggctatgaattccacccataaaccgaaaatgaagacctttaaatttgtccatttcaggcgtgggtacttcttaaataatacctggttcaggaactagtcagaatggcacccttgactttttgtttcctgcttttcctcttgttgggagaggagggtattcatcccaaagtggtttgcctatttcacattccatctaggataagcagaatagccaagaaagatagctgtcctcctgtttacaacatttggggtaaccagcatccctctcttttggtccaagatagactggtttagaaacagatgatggcaccagaggcccaggaggtggaaacatcagctttgtttgttgtccatgtggctgaattagagctgtctggccttgtagcctcaacacggccttccagctttgctcaccgtgattttcaaggacacatcttgtgctcttccctgcctgccatccagactatacccagtcagggtggcaggagctgctgccccttcctccctgagtcctggtcgtgggtggtggagatgtgccatgacgctcacggaggcatgctcaccccttcctctgtggcagaggggatggctgcacgacagctcttccctgtcctttccaaagcgtctgtggttccactttttggggcaaagcaggaatactggaagagagagaaagtggtcctttctatagtaataaagttgacattgattcaagttcatgcttggggaaaggacagggctactaacaattataatgctgggagcaatggaattttctcatgggtatgtggtaggtttaattttaattatcccagttaattcttagaactgctctgtgaagtatttcccgctttgtgcttaagttctaaaagatcctgtgccaaaaccaagaatgaaaacccaagcattctttcttgcccatcgatctttctctcatcaggccacttcttgggttgatagtggtgagtgtagccgctgccactttcagaatacccaccatgggccccagtcactgtgtggcgtggagaagagatggttctctctgtgtcatagctgaacaagcccagcccagagaggtttctgccctaggagctctcgatggtggaattgggatgcgatcccacatcctgcctgttttgaaaacagcattctttatttccaattcctgcttccattgttccttttaatatttctttgtttagctcacaaaaacacggcttgcggagctgctgcgtgcagctgtagctgtttctctgggtgcagcctgcatccgccttcctgcccgcctcctttcctgcactgccatcgtggtctccgggcacttggtccctttctcttcccctgagtccctttggctcccctgtgccacccttgtgatccacaggctctgccttctttctgtctcagactgctgctcatcactactcgggaccctaggaagggaggttccaccgagaagcatcttctcatctcagccacgttctcagtgccactgttgtctttgttaggtaatggtagctactgtaacaaataaaccaacatttccatggcttcacaccagagaaggttgtttcttggttttatgacaatgtattgagggtgttcttggttcacggatggttttcctccatgtgggaattcggggacccaggctcctttccttcttttggttctgttctccaggccttcacatcctctgtgtctggttggggacaaggagagggaaggtaaagaaggctttgtggccttggataagtgacaggcatgcctttgctggtgttctctcgtggtgacaggtcacagccccaccctgtaaaaggggactgagagacgtcgtcctgctgcttcccagcagcagcactgtggtctctgatgtgttttctgtgaggataaaaacaggtgattccaggatgaggaaagtcagggaaacccttggaaggaggggaccaggcgggtgtcaccatgggattagtggtggcttcagaatgagctgcagcgagtgccatgccttctaaagcttttgctattctgatatgcccacaccatgcccagcaggtgtctgccttgctctccgcagagagagtgatgaatccttctcatgagcctctgtccagttgttcctccctccacctggaagggaccctgggttcctcataacatcccagcggaacaggggaccttctatcctgtccccaagttcatcctcatcctcctgccggcttcctggcccctcttatgtctgcttcctgacgccacatccttctggattctctggaattgaattttgcctttgatgcttatttaaaaatatccattgcaggccaggtgtggtggctcacacctgtaatcctgtgcactttgggaagccaaggtgggcagattgcttgagcccaggagtttgagattagcctgagcaacatgttgaaatcctgtttctatagaaaatacaaaaattagctgggcatggtggcgcacacctatactcccagctactcaggaacctgagacaggaggatcaattgagccccggaggccaaagctacagtgggctgtgatcgtgccactgtactccagtctggtcaaacagagtgagaccctgtctgaaaaaaaaaaaaaaatccattgcatacttcaccgtagcgaaacatgtatgtcttacctttcctttcctgcctgtagctgctcttttacacttaacagccacactaagccagccttaaatgaaaaacaaaccagcacttcctgtgccctcctgcttccttcatgaggggtccctccctctgtgtacactccattctcattgcccatggtggtttgtttccctcttgtttctcaagccatggcagcctgcctcttgccctctttactaaaaaggcctttgcagaggctgcctgtgttctttctttctaggtctctctcatcctaggccctccagcttgattctgtggagctgccctcttgtcactcagtagcttgtggggtcttctctgtctagccacttaattgattgtgttcctcgagttgctgtccatggtctctcgttactgttttctctgtgtttctgcctctctccttggccttggtaggtccatcccctttgtgaccttggctgttgctctcatggacaactttctcttgctggtccttgtagtcctggcatccagcttctcgacacgggacttgtcctgccagtacctcagacttgcacttaaaattgaactagcaccactgtcactctccagggcctcttcttgttaattagatcattagggatgttcagaatcccagcatcatagtatgttcctcctcccgctaccccaggaaccctaaccttacctcctcctctctatctactaggaggtggccctcagagtccgtctcatcttccacctgaacttccctaataggctccagcagctgccaccccgggggctgagtacttcctccatgccttgtgcagtgctgagccctttacctgggttctcctgtttgctccttattacagccctgcgaacagatactgctcttaattccatcttacacctaaggaagctgaggccccaggtaaggtgcatccaaggtcacccaggtagtagacagtagagccacgatctgaaccaggcagtctgattcagagcctgtgttgacactcagccacctagaacacagcttggattgtgggtttctattacctgttcaaaacccctacatcccgggtctgtccctgcacgtgctctgtggcctggctgcatcttccttgaaggcagtgcatgcctcttcactcagggggcccatgcaggaacagagggccccacagaaggatgaggccagtgcagaatgggctggaggggacaatgctgaccaggaagcaagtgtagagaaatcccaggaaacctggaggagccagagacaaggcattagaactcctcgtcgtgacctggtctgcattctctgagtgtgctgcttctgttagctcgcttccttggtctcaggttatagtttaaggcattgtggagccctaaaaagcctgtactctgtttttacctgttttaggaccctttcactttggggatgtgttgattttttttttttttttttttttttttttgagatagagtctcgctccattgcccaggctagagtgcagtggcacgatcttggccactgctgcccctgcctcctgggttcaagcaattcttgtgctcccgcctcccaaatacctgggattacaggcacccgccaccacactcggccaatttttgtatttttagtggagacagggttttaccatgttggtcaggctggtctcgaactcctgacctcaagtgatctgcccaccttggcctcccaaagtgctgtgattataggcgtgagccaccacacccggcctgaaatttaaatcagaaataaaattttgatcccaacagtgatgccaggcagcccagatctgggggagagggtggccttggccagctgggcctttctctgtttcccaagtcttgctgcctctccctgctgggctttgcagcctgtgcatgtctctgtgcctttgaccttgtttatccaaaggagaggatagaatgaagtcatgattcctggagccctgagaaggatgctgtggagaaatttgccggtagaatctagctgagtgtgttgctgaggtgccagcattgtgtgtggggaggctgaccgcttggcctgcctaggcccaggatgctccatggccgggcacagaggccacttggctgtcaggtgtcaggagcctgcagagggcacacagagcctggaccgcaggggggtcctgctttctcacctggcctccttcagcatttctgtccctcagtccttagcaagcccaggagctgttgagtttggcaggtgccgagtgctgttcctgcctgtgtagctgtggctcagtcctgtgggggccccgctgtggcccgagtgcagtgattcgaggcgctgagtgttccctgactccttctccaggagctgtgttcagactttcgcagctcttggcttggagctcctggagggcttggcattgccgaccaatgtggaggtcgacagtgagagaggaggaatgctagctttcttgaccagtccattaaataagtgggatattggccaggcacggcggctcacgccttaatcccagcactttgggaggctgaggcgggtggatcacgagctcaggagttcaagaccagcctggccaacatggtgaaaccccctctatactaaaaatacaaatattagctgggcgtggtggcaggcgcctgtaatcctagctacttgggaggctgaggcaggagaacagcttgaaaccggaaggtggagtttgcagtgagccaagattgcgccactgcactccaacctgggcaacaagagcaaaactctatctcaaaaaaaaaaaaaaaagtaggatatctgtttctgcttagaaaaatcagaattttctaaatgccaggtgttctgaatacgtaagtatgggagacgactcagcctgtttcatttttatgtaaaatcttcgcgtagccatgtggcactggaccgagatgaaagcaaagacatttctccttaactttgtttctaggaatgttccggagaatcacagcagctgccactaggctgttccgcagtgatggctgtggcggcagtttctacaccctggacagcttgaacttgcgggctcgttccatgatcaccacccacccggccctggtgctgctctggtgtcagatactgctgcttgtcaaccacaccgactaccgctggtgggcagaagtgcagcagaccccgaagtaggttcataatgccccacagcccagggcgccagcccagcaccctgtcctgagactcccagtaacctgagctttggccaccgttaaagcattttcattttccattttttgtgagggcttgtgaaatttctgctgcatattaatattcctttcatggacagcatattattgggacaaacatgcggtccagctaaaggcattcaaaatagcagttgctttctaaatgcgattttctttggcaggttctttgacaccattgcatcttgtgggatatgcttgtcatgctctgtggctcctactaagttctagtccttaaattggttccatagccagacatgttgcaatgtcttaacctcattataaagtaaatgtggttctggttatccttagataatgaagtaacagtgtagcaaatttcaaaacctcttggaaatgttattttaccattcaaaaaggcttactaaggttctcgttatgggtggccctctttttgcaaaaggttttcaggcttaagctccatttctaggtgctccaacactccattatttgtatatgtatggaaataaaagctgtgaccacccccaaccctggcccccgcccagctgaatcctcagcacagtatttctggaaggctcaagatcccacgctggggaaaagaagttctggagacaaaagagggcaggtgctgccgtgcctctctgctcagtatggatactggaccttgtgctgccagggctcccagtagggccagttcatggcactcagctggaaagtccactgttgggaggcattcttaaccatccactctgtgccgtatgtagtggggtctggtcattctgttggaggagacagaccagtgacgacatttgaaatgcttggtggatgtcttaggcctgttacgatgactgagcactgtgggggcaggagacagaaagtcagtgtctcctagttctgtgctgctttaacgtgcatagaaatcagctgcggattcagcagatcactccttttctgacagatgggcctgcttactctgatgttatatcagaaagctctgaatctgggaattgtgtcccctgaattggagtaacagaaatgcttagatgatgagtgtttaaaagaaataaaccaaaggtaaatttagtttggaattcagcaagcgtcttcattcagccctctgagggcaaactacagctttttgtaaatgtaggtaaattctgtgactgtttcgtgaccccctctgatccagttttcctttataaccttctgtattgttccttctattatcctgaaataacattaatagattaggctgggcgtggtggctcatgcctataatcccagcaccttgggaagccaaggcgggcagatcacctgaggccaggacttcgagaccagcctggccaacatgatgaaatgctgtctctactgaaaataacaaaaattagccgagcatggtgacaggtgcctgtagtccctgctactcagaaggctgaggcgggagaatcgcttgaacctaggaggaaaaggttgcagtgagctgagatcgcgccactgcactctagcctgggtgacagagtgagactccatctcaaaaaaaaaaaaaaaaaaaaaaaattaatggatcaatggatttttaacctaataattaaatttcaaaaaatatcgttctttaatggtaatgtaaaggtaaaattaagataatatgtaacaagcatgtgagtgtctaaggtgtccccgtggtggaaggaaaaaataaatccccataagtgtccaagatgcccatagagagcagagctgttctggtttaaacccctgctcttagcactgtgtttttccagctgtgggtggtgggggatgagtatctttttatttccatgagatgagaaaaatgaattactagaagtgtgaaatacaaaacacagctgctctttttttagccatagactcagcagccataaaattgctgtatccagttgcagaaattcctgctgcttactcttgaccctctctcggtttgtgtgcatctcctctcaggctggctcccagatgggagctggctccaggcgacactgggtgctctgctccaggaggtccttatgtgggtcctgccctagcctagcccctctcttatggactctgtcactgtgggtttatgattcactctcaatctgtcttacctcttggtgaactgttagagtcctgcctatactttggcgcttgtgggtgtgttgtggtacacatgatgtgttggtcacttcccagctcatcttgttctgagtcaccctagatttgggacattcattcgccaccagtaccgggcggtgtatggcctgagatttgggggggcttgtgctgctacaaattggggctgaatttgagttgacagtggaccttctttatgtctactgctcatatttgaattgcaaatactgcctcttctctttcagaggctcattaccctatagctgtattattgcaaagtgcacaattacagcttgagtgtaagtcacactgcgctggcaggacggcccactgagaaagggcacgtttcctgttcgttagttttcacattgacacataatttacaatacagtaaaatgtacttttctatcaactgtagtcagtaacagcccccctcccccaaccacatcaagatatagaggagtgctgtcacttcaaacagttccctcttcctctgccacatcctgcccctccccaggtctaaccaccaatccgtgctctgtccctctgttcagcccattgcagaaggccatagaaatagaatctataggctaggtgtggtggctcatgcctgtaatcccagtattttgagaggctgaagtgggaggatgacttgaggctgggagttcaagactagcctgggctgcctagcaagaccccatctccagaaaaaaaaaatttaaaaattacaatcacgtccctgtagttcagctgcttgggaggctgaggcaggaggatcacttgagctcaggagttagaggttacagtgagctatgatcgtgccactgtgctccagcctaggtgacacagcaagacgttgtctctggggaaaaaagaaagaaacggaaccacgcggtgtgcagccttctgagtctggcccctttcggtgagcagtgtctaaagttctgtcgcgtgttgcccacgcgtcggtggctcgctccttgcaactgctgagcattgtatggctaggctgtagtttgttttcacttcaccagttgggaaacagagaaaaggcactttttaaaaagtttaaatctgtagaattttggtttttaccagttctcttctaaatcctgagggattacaggaaaagttgttgtatttcagaatattcttagcttgatgtgacctctgtccccgttaaggccctttgccgcaatgggaaggacgtcgctcggtcagaccctgaaggtcagaggggcagtttgggagtgtgtcaacattttaactgtatggactagagccaagagtctcaaggtttataattcccacgtattcaaaaagaaaaaaacaataaagtgagaagtcagtgtagagtgaaataacctgtgttagtggggaagaagtgtttttaaacaggatttccataacgtataacatcaacatgtttagagtggtgatgtttcattgggaaacgaacagtaaaacatgaaagcagggaggttttcattctggcagttggcaactttcacggcagatggagaatttcaaaagcaattgctcaattatcaaacatagccagtgtgagttctgaaataaaggtgctgattgaatgtgcagctttatggtggattttgctattcaggcaagcattttaattttctgcctgttaaattctgttttctttagtttttcatatgtggtttattgtagcttaggaatagataactgagagtatatattacacatacaacattctgatatggcaatatttaaaacaacttgtctgttttagaactagaattaaacataatcatcttcagtattttgcaaataagctcactgccatccagaaacattgtcaatgcatctgttgctccttctagaagacacagtctgtccagcacaaagttacttagtccccagatgtctggagaagaggaggattctgacttggcagccaaacttggaatgtgcaatagagaaatagtacgaagaggggctctcattctcttctgtgattatgtcgtaagtttgaaatgcctgtaaacggggttgagggaggtggggaccaggagaacatcctgtgtagatgacacttgcatggaccctctggaacccagaccgcccggtgtcctgccaagctccatcgaaactaaatctagaatgaatgtttacttctgctgtgacatataattggagaccaggcctggccttccagtcactggattctaagttggactgtgagagtttttgcagctgactcatttatcaaatgcccggctattggctcacgcctacatgatgctgggtatgtttgttaatttgagggaagcaatggaataataataactaatgatttaaaaaacaaagtaagtgcattgactgtagtggggttctgattttaaatttttttaaaaattaataccaggagcagtggcttatgcctaaattccagcaactcgagaggctgaggtaggaagatcacttgagcccaggagtttgagacaagcctgggctatggtgtgagacacccatctctaaaaaaataaaaaataaaaaattatccaagtgtggtggctcgtgcctgtaatcacagctctttgagaagctgagggcggaggatggcttgagcctgggagttcgagaccagcctggcaacacagagaaaccctgcctctaccaaaaaaagaaagagaggaagaaagaaaaattagcctggcgtggtggtgcatgcctgtggtcccagccacctgagagactgagaagggaggattgcttgagcccagaagtttgaggctgcagtgagctgtgactgtgtcactgcactccggcctgggtgacaaggcgagacccctgctctaaaataatttttttaagttaatttgtagaaaaggtgttagatgttctttgtcacattttatgatggattcctgtttaaatgccgttctctttaaagaaaaaaaaataacttgtgggagtttttaaccataaaactagcatcacatatttaccatggagaatttacaaaaaaacaaataaacggaggaaaataaaacctcctgtaatcatactactcagagataacttgctgttagattttggtctagatttaatactttttctatatttatattaaaaatatttaaaacatatgcatttctttgtcacaaacatggtatcttatagatactactgtcacatagcaaaacagtgttaaatattctgaatcagaaaaggaagccgactctccaactgaaagaggtgttatcctagagactttttctggtgatgacaatttattaatagtcactttttgctttactttctctattgaagtagtttttctattttgttctacttttaaggataatataatttataatgctgtttttcacagaaatataagaaaaaagatactaattttataagttaataaagtttgatcatcccaaatccaaaaatctgaaatccaaaatgctccaaattctgaagctttttgagtgctgacattatgttcaaaggaaatgttcattggaaggtttcagattttcggatttagggagctcaacaaataagtataatgcacatatttcaaaacctgaaaaaaatcctaaattcagaatacttctgatcccaaacatttcagataagggttattcaacctgtactgtcagatgatcccaaatgaaaaatattaatcgttaaccaaatatcaaggaattgatcacattttacagtttctgcctaggattatgaatcaagatgaaaaggctctgcatgtttaaaaatatatatttttattttcttataaatcttaaatatctacacttaagatttatttgatatgtgggatccattcatattttggattcaacagttctgtcaaaactgtggcagtgataggggattctttttttcccactgaactatcacaaaattggaaaaagagtaattggagaaccccactggcttagccggcccgaagcccgggagagggcaggcagtgctgtggatggggtcatcccagcgcaacgctgcccctgctacctgcggatctcgctgaggcctgcctttgtcctttgacccttggccatttgttagtgtctctgagagctggactgctgtaccctacttccccagggggcctaacttcacacagcctctgccgcagtgcgtggttggaggtgacggccttggtaaatcgagtttcctacctcctcaattatttgtgctcatacactgtatatttttagtgaggtttatatttgggatgtgttttctccttcttaccctttctggcctttctatggcattaatacctggtctcttcttgtgtacttgaaaatgaatctctcatcatatttttccttagtgtcagaacctccatgactccgagcacttaacgtggctcattgtaaatcacattcaagatctgatcagcctttcccacgagcctccagtacaggacttcatcagtgccgttcatcggaactctgctgccagcggcctgttcatccaggcaattcagtctcgttgtgaaaacctttcaactgtacgtcttcatcctgccgactattgccagttgcagttttccctgccttaaaaatggagtattgaaatttttaactttaatttctgatttgcaaaatagtcatcttttgttcttttccttcttgctgttagccaaccatgctgaagaaaactcttcagtgcttggaggggatccatctcagccagtcgggagctgtgctcacgctgtatgtggacaggcttctgtgcacccctttccgtgtgctggctcgcatggtcgacatccttgcttgtcgccgggtagaaatgcttctggctgcaaatttacaggtattgggaagagaaaccctgatattgatttatattgaaaatttagcaggccaagcaaaacaggtggctggctttttcctccgtaagtatggtcttgacatggtcaccgatagaaacatggaaacatctgcaaacttgccgttactcgtgtgtccgatctgactgtttcttgtatttttttctagtctgcccttactaggatgaactgtacacatcagttcatcctttttaaatgagcatgaggttattttgggttgttaggtgttacaaacacactaatgtgtttttgtctattagagcagcatggcccagttgccaatggaagaactcaacagaatccaggaataccttcagagcagcgggctcgctcagaggtaatgctggaaacacaggtcgtccttgtgttaggacaacccaggatataaaggatatagatttgtacgggaataaattcacaggacaagaaatcgatgtgccttataggtgggtttactgcagaagtgccataatagaaccttcctacttttaaaacaaccagatctcactttctaaagagtaaaggatgaccggcaggatcacgtctgtgacgtgagtggaggcagtttgcactcctggtggctgtttgagaggtagcatttagaatgcctgtattcactgtcctgtgatgagtgggaaaataggttatcaggtttatcttagcaaaatcaaagcatgtcatctaattgctaaacaagagttggcaaatctgagagacattactcaatccttggcatgcaggacttacatctgcatcctgttgccattttatgtcttcaaagcatttaatcatttagttgtgtttgcaaagtctttgagaagcctttgtcagaaatccctacatctcctatgtgagtgtatttccatgactgcagaataagttaaacttttacctttttccttcccttgcggggcggggtggggggcagggattgtgtgtgtgagagggagagagagacagcagagaaggagaatataattatcatgctgtgtactttgagctgaaactgcaaaaaaggaaaaacacacaaaaattattatgcttttcagtctttagagtaccttgtctattatgcttttcagtctttagagtaccttgttgatggtgtttttaaatgggattgggcacaattaggtggacagtttgggatgatttttcagtctgtagggccaagctcttttgtaatttgcattatgaagttgtcactctcatagcagatggcgggagataaactattattactttttgaccctagacttagtcttcagtccagatgagggagattaaaagattataaatatcttgtgccagatgaggtgattttattttgaaatgaccatgaattcctatcagttgtcttactgggatatttgatagtggaatttgtgcatttgagtcttagatgatctgttttacatttattaagaaagcctttattagcttttatactgtgtattgcctgttgcagtgtttgagtataaatgaaatttctggaaaatattaatggagtacaaactgtgatacttaaaagtaaactagggcctgcatttgtatcatgacctgtttgagtattgatgagaagatagctgtgaagaaaaaggtttaaacaagtgtattttcctttaagaagccactaatagtgcatctccttagagtgtatatttctagaatcctagtgtgcagagtttagactaagactaaaaaaaaaaaaaaacaaattatactgtaatttcatttttatttgtattttagacaccaaaggctctattccctgctggacaggtttcgtctctccaccatgcaagactcacttagtccctctcctccagtctcttcccacccgctggacggggatgggcacgtgtcactggaaacagtgagtccggacaaagtaagtgtccagcgtgtctgcatgggaggcacagggcgctgagtgcctctgtcacctgtggcagatacagagagtgcagaggaggtgccgtggacccaaggagttctggcgctcggctcggctcagtgaagctgtggttagagacgtggggggccatcaaggtctgagggagccaagcagtgctgatgtgggacccttttggtaggagtgtggggtgagtagttagtgggtgaatcaaggaatagtcggccgtggcctgcaggcccctgactgcacaggccttcaagcacatgtcaatgccgttagcctccctccatctcctcataccttctggccacctgtgagttgcactgccactgccagccattctggtatgttgtcagcacctccactgctcatacctcatggttagggaccacctggagccttggtagagccttggtagagccttggtactctactttcctggacaaagttcagcttatgaatatgaatttagatttcaaaaaccagcagcccaagtataagaaagcgaaggttcagtcctgccttcttaggctctattcgctaagcacctgccctgccctggttgctggggagagatgagtaaagcagacaacccaggagaggatggcaaaggggccgctaacccttagtggtttagctatatttggaaggcctattggaagttcaccaggtgaagggggaggctgtgagggtgcccaggcaggtaacagaagtccaaaggggaaaacctgtggtgtggtgagccgtatagccacagcctgccggccggcagccctctcagcctagtgcggtgttcccaagcactggcctaggcctgtagctccagggatgtgaagtccccttgaacgccgcccatcatgttccccttatccatttttttcttcccaggactggtacgttcatcttgtcaaatcccagtgttggaccaggtcagattctgcactgctggaaggtgcagagctggtgaatcggattcctgctgaagatatgaatgccttcatgatgaactcggtacggggggagcagtggaggcaaggaatcctcagcttttcttgtgacttccaagtgggatttgtctcatcatcatgtgacccacttgttgacaacacatgttggggactccagtctgggcagggacgggatgtcggagagactccactctgaatggggccgggaagtggggaggactccatttcagatggggtcgggacatgggggttatgctgatcgagacagaaaagcacattgtttcagccacattagaatccacggaggtgttgttttgaaatccagctggccccaaggctgggtgtatggtttgggatgagaactatctggcctccactggaggaacaaacacaggatgttatcatctaagctccatggccaagacagaatggaagtcaaggttgcgtatttgccgtagacttcaacacagtgtcgtaatgcgtgacgtcaataacttgtttctagtgtcttggaagttgatctttagtcgtaaaagagacccttggatgcagcgagatttcctctactcacacctctgttagatgtagtgaggttcttcaccccccaaccccagatgtcagagggcaccctgcgcagagctaggaggccatgcaaagccttggtgtccctgtccctcacccgtgggcaggtcctgtgagcagtgggggggccacctcttgggtatggtgcagccatggcccaagcagggcttcttctcagacctactaggacgggagaaacctcctggtgctttagccctgcgttgatatgcagcaaatgggagggaagtgggcacctgggaggacaaatgcctgtagaggccgggagtgacggcaggtgttcatgaaaagagaccttgtggggagggcaacacaacagtgtgttctgatgtactgaagagctcaactgaaaacaacaggagaattagcccaaaatccatttactaaaattgtttatctttttttttttttttgagacaaagtctcgctgttgtcccccaggctggagtgcaatggcgctatcttggctcactgcaacctccgcctcctgggttcatacgattctcctgcctcagcctcccaaatagctggtattaacaggcatgcaccaccacgcccggctaatttttgtatttttagtagagacgggatttcaccatgttggccaggctggtctcaaactcctgacctcaggtgatccgcccacctcggcctcccaaagtgctgggattataggcctgagccaccacgcccggcctaaaattgtttatcttaagattcatgcagtgaaagctaacttactgagtgataaatttgcttagtgatctgtttattaggttttccaaatttgctaattgggctttgaacagctgtaaaagttctgactgtaaaagaaagcttcaacttttggcattcatgatgcttttctgagtattaaactaagatagatgttttacctgaaggatcggccaccaatctttaaatggctaaacaaaagggttgctaaaacataatccaaattgacataagaaataccatttttccaaccaaaattttggcattcatatggctacttttacgtatttcagctgcatttgaacatctttttcaaactttagggtggttggtgtatcactgaggtcttggatgacactttagctttgattttgtttttatgaattaaaattgtcataccaaaatttttatttcaagcaaatccaagagcataaaaaattaaaatattacttaaaatactaagagagaacagatatatattttactaagcatatgttgaatgaaattgttcaaatatttataacaggcatagagtagaattttcttaaaaatatttttgatggtataccaatttgtattttctcagaaacatttgccttattcttttttctgttgtgtttttcttacctgattgaaagctcataatctgttgttattgtttgttaacctttaatgctctgatttcaggagttcaacctaagcctgctagctccatgcttaagcctagggatgagtgaaatttctggtggccagaagagtgccctttttgaagcagcccgtgaggtgactctggcccgtgtgagcggcaccgtgcagcagctccctgctgtccatcatgtcttccagcccgagctgcctgcagagccggcggcctactggagcaagttgaatgatctgtttggtaattaaaattaaaatttatcttatttttaaaaagcattccagggccagtatagtactttgcaccaagtaaatgtacaataaaggcagtggatctaatacattgaaagcgtttacagaggtagctaaagagcagcacgggtgtcctcggctcagaatttcttcctgtgtgtttgccactttgccattcattgacatggtcatggacatagggctctaagcccttgaggaaggctgggccagacctcaggggagatgcagccccaaaccacgtgcagtcctgtggacggatgtgtagatgtgccactgaggaacaatgtcttgagctttcatcagattctcagagaattgcttgactgcctttcgaagttgatgcatctgtgctcacgtttgcacccacccacgaggtccttctgtttcaggggatgctgcactgtatcagtccctgcccactctggcccgggccctggcacagtacctggtggtggtctccaaactgcccagtcatttgcaccttcctcctgagaaagagaaggacattgtgaaattcgtggtggcaacccttgaggtaagaggcagctcgggagctcagtgttgctgtggggagggggcatggggctgacactgaagagggtaaagcagttttatttgaaaagcaagatctctgaccagtccagtcacttttccatctcagcctggcagtaagtcttgtcaccgtcaagttattgtagccatccttcaccctcacctcgccactcctcatggtggcctgtgaggtcagccaggtccccttctcatctgcacctaccatgttaggtggatcctaattttagagacatgaaaaataatcatctggaagtactttatgtcttaagttggcctggacatgtcagccaaggaatacttacttggtttgtgttagtgcttgtaattcgcccccagaatgtgtacacgttctggatgcattaaagtctggcctgtatccttaaagggccatcgctgtgctgcctgccctcagcaaggacacactttgcagacccacagaggctccgcctccacctcacaccaaagaaagggaggagtccaaagggcatcagtgccattactcacaaaatgataaatacacccttattctgaaccacgtggagtcatatggtttgtgatccctgtccttcaggtttcagcttagtggggaagtgggaaagtcagcgtgtgatcacagcacagggtgattgctgctgattatattatgtgcctgctgtatgcaggatgaaatactttatatgcgtcatcttatttgactctcacaaccccctgtgagataggctctgttactcccatttgacaggtgaggaaagcaaggcttagagaatttcagtgacttgcccaggtcctctgagctaggaagtagccattctggcatttgaacccaaggcctgctatccctagaacccacgctctcaaattcaacctatgacagaggcaagccctggtgctgtgggagccccaaggaagagcctctggcctggtggccacgtagcccaggagagatttctacaggagcccacagcgctgaaggagagagaggcagcagagtaagggggctttgtggcagagaggggactggcactttggggaataggtgggtcaggactgaatgtaatggagccatgtcagagctgtccttctggaagggcaagggcacctggacgcgctgcccctcagtgctttggacggttccacaactgtgattcacacggcttccccaaacgaaggtacacgagtgggcattctgtgactcggtacttccctttaggccctgtcctggcatttgatccatgagcagatcccgctgagtctggatctccaggcagggctggactgctgctgcctggccctgcagctgcctggcctctggagcgtggtctcctccacagagtttgtgacccacgcctgctccctcatctactgtgtgcacttcatcctggaggccggtgagtccccgtccatgaacggtgggttcctatcatagttcctgtctgcttcaccatgtttttattttgtgctgcctgtttgccaggtactaagctaggaattggggatggagaggtagataaaatatgcatcaggaagggctgggccccatctcttactctccaatatattggagtctacactggaatttaactggaatttgcttttttagtcattttatttagattttgaagtttcagctttcatcaaaaatacctctaaactttatgtctctgtgatctttggtcttagctgttttatgtatttagtcttatatgatcataagattaataacattacattcagaagattatttgttttctgtcagagttaaaatgtttgtttttatactgcattgtaatattaacgtactgtaaaataaaagtggcttgttcttttcaaggaacagtatcctcaacaagggtcattagccacaatttttaaaaaattggacgtcatagtttacatgttagagggcgttttgaagctttgtatttttaaattaaatgttatagagtgatgttttcatgtttcataattgttttcatctgtgcatttgtagccaacttgaaaacaaagatccagggattactacttaaaagccagacttcttggaggttatagtgatgattttgatagtatcttgagccgtctcataataacctcagggtgagagatggccaacaggagacagtcgagggacttagaaatctgaatgaaatctgaagttcaaatcttcagacatataccactaaccaagagattggtacctcagtctagtattgtctgtttgtctaaaattggttctaaggaatctaggctagtctgtctatccctttcaacttttgtgaggctgcacaaatgtaaaatgttgaataaaaagcactgatggaagtgtgtagaaattcttctctttgttctgttgtaattttagttgcagtgcagcctggagagcagcttcttagtccagaaagaaggacaaataccccaaaagccatcagcgaggaggaggaggaagtagatccaaacacacagagtaagtctcaggacccatttttttcttacatgttgttcctccaggacttaaaaatcattcacagagacgtgcaccgcggtgagtgtggactcctggaagcgcaccgtagctccgctgtgtcctgctgctcctccctagctgtcagggaggctgtagtccattgctttgccagctcttttgtttccgagtgaacaccttatccgtacacatgcggctgtctctgaccctacagaccagctgggatgccactgggggagcgctcccttccccccgcacttcccacactctgcagttattctgagatccttgagggcagggaacaggtttgtcttctttgtgttctcagaaattaatgctcggcctctggtcagcaagcaacaaccttttgttgagtgataatgaataaataaatgtttcccacatgagtattcagtaacctcagtgtcaggttcagccatctgttttggtggatatttaaaagaaaattccgcttttcctacagaaaaaaaaaaaaatccaaatcccagtgatttaagccagttatagacttagacatatactacggcttttcatgcactttcctcccaattctagagtaggtattttactaggaaaatggtggcagtgcctgttgggaggaagattctttggccaagtgtcttttgttcttgccagggcccctaggctgctggggtgcttcagcttctttagcccagtgtctggtggggaatggcccctgttgcctgtcccacagaggtgggggtgcctcacctggagcctgtccacacattttacacagcacgcttacctggagcatcaggcatcttttccatgctctgtggctcaggaaacacgccttttcaatcatgagtgcaccagtgcttttgggctttttctccccgcttttgtgcaatcctggttgtggatggagttttcctgtctttagtcttctgcatagtacttttctcttctggttcccggttcaaggttttgtaattagagaatgacccagaagcaatggcattttaatgcacagccaaggacttctctgaatttgtatctcaaacctctgtgggtccttcaggcttcagtttgtgatttcatgatttcttgttgctacctaaggaatatgaaaacacccacctccctactctgcatcttccagccgagtggcacctcaggctgtggatcctgtgcttctgtggtgaggataagaatagtgccaaccgtgtggattgaaatcaatcagttaatccctccatgtaaagcacctggaacggatgacagtcttgttatgaatactcaacaaatgctatcatgatttttagttagatttccattgctttaaaacagttgagacatcttggcggtttgagttagagcaacgggccctgaagtgggttctgtttgggtgaagatgattatgcttattccccatggccctctttaggcaagagtgggaagctttctttgtttttttaatcacctcgataggacgttacttcttaaaggtcatccaataaatattaataggccgggcgcggtggctcacgcctgtaatcccagcactttgggaggccgaggcgggcggatcacgaggtcaggagatcgagaccatcccagctaaaacggtgaaaccccgtctctactaaaaatacaaaaaattagccgggcgtagtggcgggcgcctgtagtcccagctacttgggaggctgaggcaggagaatggcgtgaacccgggaggcggagcttgcagtgagccgagatcccgccactgcactccagcctgggcgacagagcaagactccgtctcaaaaaaaaaaaaaaatattaataaagccaactcgttagcgtggggcttaattgcttaagtccaatgagaagtccttctctatcctaggaagttgcccaaactgtagaatctcgtggcctgtgggtaatagccacgtaatacacactcactgcctcaacaaatcatattttagtaggtatgatattctagactcaagacaccattctgtggatcttcccaagggtgtgaagtgtccacagcgtctgccttgggagtttccatgcccaccagaaccatgccccaagcccctcaagcactctgacctaggaaagccagtgaagcaaggatgacaacatggccctttgatactagctgagggacagacacaggtcctgggagaccagagaaagacgaggggcagaggaggtgtcctaaaggaagtctgaggctgaggagccacaggatggcttccagctgtcacaggctgctgctggccttatcacagagagtgggccagagggctgggaaccaaggccagagctcaggttcaggaccattccagcaatcccagcagaaaatggggagaattgtatggtataggcggatatgaaggtagaatctgcaggccttcagtggccaactcagagtctaagtggattccacagttacagcttgagcagctggttgtaggtcatgctttctacactgggcatataggatgtgttttttaaaaagtcctctcttaaccgttgcttgtttagatcctaagtatatcactgcagcctgtgagatggtggcagaaatggtggagtctctgcagtcggtgttggccttgggtcataaaaggaatagcggcgtgccggcgtttctcacgccattgctaaggaacatcatcatcagcctggcccgcctgccccttgtcaacagctacacacgtgtgcccccactggtgagtctgctcgttccttgcagaagaccaagtacggtgaaaggcaccggtaggccctgggctgggcacacgtgagagggcgggacagaatccccgcagcccagaggctgcctgctgtggttctggtgcccactgtggttctggtgccaggctgctttcctcaggcaccacgtgtggaggtcgctagtagaaatactgggttttctaaaatgaactgaggccctacatccctaagagattagtgttagacctgattctagagcaactagaccactttgcttaatagcagaccagaaaccacaccccctcgagtgagtgagattttcctttggagataattcatgtttttctacacagttttgcagttgtcttcagaattggtttaaagtaggtgttattgccaggcgcagtagctcatgcctgtaatcccagcactttgggaagccaaggtgggcggatcacttgaggtcaggatttcgagaccagcctggccaacatggtgaaaccccatctctactaaaaatataaaaattagccaggtgtggtggtgtacgcctgtaatcccagctactcaggagactgagacaggagaatcgcttgaacccaggaggcgaaggttgcagtaagccgagatcgcgccactgcactctagcctgggcaacagagcaagactccgtctcaaaaaaaaaaaaggtaggtgttattgatcagaacccttgtttcagataacatgaggagcttagcttgaggagagtgagggttgatggagggggactgacttctgcccagtgaaatggcatcatctcccaccagcccgctgaaataagatgatggggcctgttccttagggcctgcagcatcctcaggcaggaaagaaaggccgacctggcagggtgtgagccagcaggtgtaggtcagggagaatggagccaggtcccagggaagaggcttgtggctgcctgagaagggtgcgtgcctgcctgtgtgtgtgtgtgcacgtgtgtgtatgtatgctggagagtctagggaggcttgctccaaggacgcagtattgtttgatcctgagagataaggattctgccgcagggaatgaaggtattccagatggcgggcttattccgaagaagaggccagtgcctggcggtgctggaagcagttgcagaacagggagttgtaggctttcctgggaagagagcagcaggggtgctggagaagcaggccacacttgctgcatggggttgctctcggccccactcttggtgcacagcgagtcactgtgggttcattagcatctggttatgagacagtaactgctcctttggaggggctcgtggagaccatgcaggagggcacggtcttgaggtcatgccgtccagagcacacctgaggataggccaggacgggctgcacgctgtaggtaaaattcctccagcaagctcttcactggcattgaggagttccctgagtgcggtcatctggaaggcagctgtaacaggcactgcagtctctccctgggtgggtaccagagaggagcataggggagcataaccgatttaaagagagggctttcctgtggtgaggtaagagattagctggtcattatcatagagccccctctgcctttgtgcagatgggctgtgggaatcctggggttccgttgggtcctttgtcacctcactgaaggcatgtaagctgagctggccagaccgtgagctgatcctgccacttgaacagcatcaagcctgcctctggattcttctgtgcatggcacttgtctgagcacctcacgcacagagaactggacttcagagtttacagaaataagctgtatggttcattttcatgcctgcttgccaataaacatatctgagctgaacctcattgaacgcctgcctttattctagcacagcacctgctgtttgtgggcgaggggtgctgtctctaactcctgcctgcttctcccagcactccctgagtggggtgtgccagcagcctcaggatgaggacaggaagtgggagggcagagcagatttgggagggccacttgatggggaaggaagtcccaggaagcagttggagctgttttctgggggagaaggtgccagctctgggacagtgttggggtagtgaggagggagcccagtggagagaagtcgggcttcctgcttcctcacagtatgtctgtcctgactcaactcggatgatgtcacttccttttcatcttctcaggtgtggaagcttggatggtcacccaaaccgggaggggattttggcacagcattccctgagatccccgtggagttcctccaggaaaaggaagtctttaaggagttcatctaccgcatcaacacactaggtactcttggggcctctccttcaggtcaccattgtcggacatctaccgggaggaaatccagagcccccagtactgggatcttctcatttgactccagaaaagatttaagcatgataataatacaaacctatgtgaatacattttgcagtgttggcaaaactccttttatactgagaaaatagatcccagttcctgtgttttgtggcttgaatcccagctttgtgtattccgggcttgtttgaagtcaggaaaggttcatgtgtagtggacaacgtgagaccaaattctgccttagattttgcatttaggctaaacagtggcagcacttgtctcagaatgttttcttgtgttcaccagtctgatcctgttgtgtctcagtggtccattttctcatatgggaacaagcagacgggagcagatggagtcaggtttcttggcactcgccttccccagagcctagaggcagcatggggagaaagcaggcttggggctcagacagtcctggtctgcttccagccctcctacctgagcagcgcagggcaagtccgtctaacctctagagaccctcagttttgtcatatgtaaaatgggggtcgtgtctatttcatagaattgttgcagatttagaaattacatttctaaacaaatgttaccccttatttctaaataagtgtctaaatgaataagtcaccacttttgcccctatttgatggcaagaggtgtgatcttgtggtgggactgtaatcagtcagttctcagtgactgtgccctgctgtggtgtttcctggaatgttcctgtcttgtcctagaaagtctggcaggggcaccctgactccactgtccagtcctctccccagtccctcgggcttctgcagatttgaggcttgtttggatcccagaaggttgtggcaggagacaccttgcctctactttcccctttataattcaatgtccaaagagagccctgagcaggtacctcacgccagctgcctcacggagctcctcctcttcctggctgtgaggatcggtatcagtggcctcctgctctctcccccttgcctaacacgagcacctttgcttacttgggtgcccttgctcttgaactgcccatcggacgtgcgtgacccaagactgtgccgcagtccttgccttgtctgtgctcattttctttgttcatttttttccctgtaacgtaaattgttatatttgtctgtatctgtgtctgaatcagtcctgcacgctctccttctctctgtctcttgttctttctttaccccgtttatcacggggaccccgatgtccattgctctagttctcctgtcctaagcaccccatcccgtctctctggccttaccacaagtggcgtggctgcctcagacatcatgatggggacatgaagcacagctgtcagaaacaactgttcgttagatacactcgaatgcagctcatcaatagggatggagggtctgtcggatgtattttcactgaatccccgttcctaccttgatacactctttttaatctattcttctagacaggtcagaggaaccattactttgacttttaaatttttagcagctttattgaggtagaattcacatactacagatttcacccactctaagcggacagcttggtggccattagttttatccacagagttgtgcagccagctgcacagtctcagggctggactccagggaagattttagcccatttagtgagtggggcagaagtggccctggccctgcacgaggttgcctgcatgggcgtccctgccctgtccctgtgtctgctccactgggggttgaccaggctgccagggccgacttgggcctgtgccacctgcctctcatgtgtctcggacagtgcagccgatgtctatacttcggtttcctcaatgatgaaatggaggggatagtgttccccgcatcatagaactgtgtgaggtttaagggactcactgcccttggcgtggagccttctccaggggccgtgctgtgtcggcgtagctgtcagctctccgttacaggcttgagaagggttgacactctctcatgtaacatttatatttctaggctggaccagtcgtactcagtttgaagaaacttgggccaccctccttggtgtcctggtgacgcagcccctcgtgatggagcaggaggagagcccaccagaagtaaggccacaccctgtgctggttggcacatgggcagttatggccgcttgcaggcctttggtggggaataaaataaggcagcaagctggtgttctttttttctcttaccttatttttgaaagagtagctgaatggtgtcttgactgatattccagagcagggacaaagcctgctgaggtctgggggctgcgattaccaatggctggaatgcattttattacggtgcattccatgttaaggatcaatacgattgtgccctttctggaaaatatcttttagtttatcaatattcagaggagtgtaggttgaattaaaatgaaaaggcactttataaaggccatgagtagtacctggtttcatttttctaatgtcttgcagagattttatcaggcttcttgaagtgttcacgtacattacgctaacacgatattaataataactgtgctctggtacagcggagccagcagaatgggaagttgtggaatgcaggcccttgattctgatagaaggtgtggtttgaactcacagaaatgacagtttggagggtagacatatgtcacaagtcatcaagattgtctttaaattcatgcatagaagctaacagggtgtcataagcaaggcctgtaaaatgtatgagggaattcaaagataatttattaaaaagtaattcatgtttggagttttgtgcccaaaggagtccttgatttgaaaaatgggcttttgcccatcagattgtttcagggcccgtgtgtgcggaggccctgccttgtgccccgtgagctcagcctgacagaaatcctttggtagcacttaaggctcctcttcctcccattgaggcagggaagactctgggttctgcaggcagaggtggttgtgggtgtcttgctgctcttgttgacatgtgggctctccttccaggaagacacagagaggacccagatcaacgtcctggccgtgcaggccatcacctcactggtgctcagtgcaatgactgtgcctgtggccggcaacccagctgtaagctgcttggagcagcagccccggaacaagcctctgaaagctctcgacaccaggtttgcttgagttcccacgtgtctctgggacatagcaggtgctggggacagtgggttccccgctgaagcgtccagcagcttcaaccaggccgttttccttcattgctagaattgaaaacaccgtccgtgtggcctgtgcaggagatgcagacccaaaggtggcctcctggtcagtgagaagctggaaacgtgacaggaactgacgtggggttattgagcatttaggggaagacgttagcagagcaggaatgagcaggcaactagtagaacacccacttaagggctcacggacaggtgctcacttaggaagtgagtttcatttggtattacaccaggttcctttaggcaaagcggagggaaagttctggtgtttttcacttgtaagattttgaaggaaacaaaacactctttaccttttttctaaaatgtaggtttgggaggaagctgagcattatcagagggattgtggagcaagagattcaagcaatggtttcaaagagagagaatattgccacccatcatttatatcaggcatgggatcctgtcccttctctgtctccggctactacaggtacctgagggaaagggtgcgggggagcggttgtacttgggctagaatgagagaagactggcatgctcaccacaccagtgatgcgggaagacctgagtgtggtctgagttggaggctgtggtgctaaatacgctgcccctttcataagcaggagtcttagtcaggcccagggaggaagtaaaatctggaaatgaatgagaagcattctctcctgccagtcaagaaatgagaagcgaaagaattctcacgggctgtaagaccagcaggatttaaaagttgaattagttgcttatgttaagaactcaaccaagttcatctacacaagctgaatctccagcttttcctaagaaaccatgtgtggcagtggctgcagggcagggcacagctgggcctgagcaccccgctccctgcacctctcccctccctgggccctgcctgtcactgcccactctcccaccaagccttccggttgtgtgcctgccctatcacaggcatcggagcttgtcacctggtttaaaagaagagagttgtgtggggatttgggatgcacgtttttcactcaaaagtattttagcgtagagctctgtgattccgtagctatttaggagtttaagcaccttgaaggctttaattgcagaaagttctatgtggacgtgcaatgtgttatacgcagtgtctatgagactcaaatgtttattagggcgttgaagtaaactgagcacttggagggccatggatccagccttcaaggagctcataagtcaggaggacccaggagcaatgacctgtcatagaaggcagaaaagaggggcacagaggtgggtgggaggcatacacaggcagctcctggagctccaaggggagcaagtgcttccagggaagggggcgtggaggcccctttggaggaggcaagttgatctggggtctggcagagggttagctggggacatttagcgggaggctggtgcccgggaattggggggatgcccagcagaaagacatgaggaggctggcctggggcgtgggggggtgtgaaaggttaagtgggggcattatcctgctcccgctcctgccggctgtatctggtcagcctgggcaccgaggtggggttctggaaggcactgttcaccaaaatgcttatctgggtcccccagagagcttgcctgcctggactgtcggctcgcctgcaactgctgactcctaagcttttgcagctcagcccacaaccagttcctattcacagaggtgggagctgaggggtgacaagtgactgctgcagtcttatttgtcatagagaaaaagtgacagagtccagcttgcccactggccctgccagcttaactggttataaagtgacaaatccccaagacccacagggctctgcacaacctgggccctcctgccagtggcggcgagggcaggtggctcacggctgggtgcctgtctgggcaggagctgggctggtatggggtgggcctgcggccctgcccccctgtgcagatcaagactcagggtgctggtgttcacaggtgccctcatcagccacgagaagctgctgctacagatcaaccccgagcgggagctggggagcatgagctacaaactcggccaggtcagtctcgcgcccccgccgcctggcctctgtccgtttctgtcctcagactttggcgcttgacacacccaggagaaaagctcagtgcactttttaaatgaaaggaagttttccttttttttaaaaaaaaatttaatgttcattgtttttatctgttttattcctaggtcccgcaagcagaggaagcattagttttgtttttatttatgttctgtattccagaaagtagttaagagacctcacatgtagcgatagagatgtgtgtaagagacagtgagagggcgtgacttggacttaagcaaggaccgtgagacacaaaaaggggggtgaggacagagtggagtcagctgaaatgctcaggaggaagtagacgccatgaagggccatggtatggggggccgcaggcgtggccgtgagtgtccctggggccagctcttggggggctccctgagtgtccctgtccctgtggccagttctgggtgggagccccgtgtgcaggcagacagctcggccacttcctagcaggtcacattggtctgtgcttctgtttcctcctcagataagtgaagggattcaagggtctgggtgtggtggctaacacctgtaatctataacattttaggaggctgaggcaggaggcttacctgagctcaggaggttgaggctgcagtgagccatgattgcaccactgcactccagcctgggcaacagaccagtactctgtcccttaaaaaaaaatgtaaacagaaacgtagggccatttgcatatgatggcacatggcgtggagccctacaggtgtatgctgggcggggcccggctgtgctggccgacttgcacctttccctccaccccggtgctgtgtctttcgctcaccgggttcctgatttagtgaaagcagttgtgcaggacagttctctttgtagcttttgtttctgtggaaatgggtcagaatatggtgtttagaaacacttatgagctctgagagtttcctcttctgagttcctggcctgcagccttcacagcagaaaccctgtgatgtcacaagcctgtttctgttccctgctctctgcctgtactgtcctgttttgtgcctgccggtttcagtgacaggaagcagggagctactggaccagcctgtatttttctagacatagttggaaaaagaagtcccactcttctgtcctttcacctttgacagatgtttccaccccaagataagtgaaaatgaccaataggatgcactgtatttttcatgaaagtgtttctgaagggcaggctgagagtgagaggcctggggctcactgggtgcctctggccttgtcctgggcccagggacactggtctgtgcccgaggtattccctatccccccaaccccgctgcatttggccacatccttcaatgtttgcgttgtgtccagcgtccgcaaaccaactgtcatgggatcatactggggctgaagtacggtcccacccctgccctgtctggggctgaagtacagtgccacccctgccctgtctggggctgaaggacagtgccacccctgccctgtctggggctgaagtacagtgccacccctgccctgtctggggctgaaggacagtgccaccccttccctgtctggggctgaaggacagtgccacccctgccctgtctggggctgaaggacagtgccacccctgccctgtctggggctgaaggacagtgccacccctgccctgtctggggctgaaggacagtgccacccctgccctgtctggggctgaaggacagtgccacccctgccctgtctggggctgaaggacagtgccacccctgccctgtctggggctgaaggacagtgccacccctgccctgtctggggctgaaggacagtgccacccctgccctgtctggggctgaaggacagtgccacccctgccctgtctggggctgaaggacagtgccacccctgccctgtctggggctgaaggacagtgccacccctgccctgtctggggctgaaggacagtgccacccctgccctgtctggggctgaaggacagtgccacccctgccctgtctgggatgtttagcccctagatgccactggactgagccgctacttgcttttgggaaagaggggtgggggttaggggtctgggcgaggggagtgcaggggctcctccttggcctgagagctgttcatacagactcctcgcccactccctgcagggtgctgggtcccaggggggaaatggcccttggtgccaagaacgtgagttggggctagtgccagtgatgatggagaacagctttttatgggcacacagcccacagcactgtgccaagtgctcgaggcttcccgagaaccaggcagaaaggaggacagtcgaggtgtgctgactgcgtggtggctgcgtgatctagagcgcgggtcacaaaggcgcgagggagctctggccttgggtttaccgcaatgactgccagtgcgggagactggaaaaggaatctcacgtattggttccgtgttttggggactccattcagatgtcacttaggagtgaaagcatcccttcgtagagcctctttctgtgtcaccctcctcagctgctcctggggttgactggcccctgattcatgcctttagcatgtgctggagcttcccagcagctgtccagcccctgccccaccctctctgtgggctcccttgcccgtaacctggggtgtctgaacgacccttgctaaggggcagactgttagacggtaggcatgtgctgagtcccagtggccacacccacccaccaggagcctggcactgtggccgcagcactgagcagtgccccgtttctgtggcaggtgtccatacactccgtgtggctggggaacagcatcacacccctgagggaggaggaatgggacgaggaagaggaggaggaggccgacgcccctgcaccttcgtcaccacccacgtctccagtcaactccaggttttccaatggcctttttctttttaacagaaatttgaaatttcttatcagtcatttgatttgtttgaggtgcttcttgaaatgagcctctcatctcatgtacttggaaaatacccatctcgcatattccacaggaaacaccgggctggagttgacatccactcctgttcgcagtttttgcttgagttgtacagccgctggatcctgccgtccagctcagccaggaggaccccggccatcctgatcagtgaggtggtcagatccgtaagtgagccttcccattcccctcacacctgcacgtgccacacgcaccacacacgccacacaccccacacacacacaccgcccacacacatgccacttgcacacacacccctcatgcatgcaacacacacacaggccacacgcaccatagacaccacacacacatgccacatgcacacacatacacggcatgcaccatacacacaacacacacagcacacatgccacacacacacgccacaccacatgcaccacacacatgccacatgcacacacactccacatgcatgcaccacacacacacacacacaccacacacaccacatgcaccacaccacacaggttacatgcacacaacacacacatgccacgtgcacacaccccacacaccacatgtatgtgccacacacagcacacaaccacacacatgcaccacacacatgccacatgtgcatgcaccagacacatggcacacactacacacacgccacgtgcacacaccccacacacatgtacgcaccacacacatgccacacacacatgcaccacacacatgccacatgtacacacatgtatatacacaccccacaccacacacacaccacttgcacaccacgcacacacaccacatgcgcacacacacaccacatacgccacatgtacacaccatacacacaccatacatgcaccacgtgtaccacgcacccacacagacacagcacacgcatacaccacacacacacgcacacatgcgtcccgcacagtaatgtctcttgggtgtaagaacacgacttgccagtagtagcgttctggatgcgttgcctggattctaacagcgcgattctccccttgccctcctggttttccacatctccagcttctagtggtctcagacttgttcaccgagcgcaaccagtttgagctgatgtatgtgacgctgacagaactgcgaagggtgcacccttcagaagacgagatcctcgctcagtacctggtgcctgccacctgcaaggcagctgccgtccttgggatggtaagtgacaggtggcacagaggtttctgtgctgaagccacgggggcccatctgccttgggacctggtgttggccagaggtgccgggtgcggctgcctccttccaagagttgacccgaaccggactccacggcccacgtgagctgcagtgcttctcagatggagggggttcagcgacggtcagtgccattcacaggtcactgtgatgtgggttgtggcggccaagccatggtttggggtcccgtatccctgggcttatgacatcattgtagtagcccatccccacagaaccacggtgtgtggtggcgctgaggcatcgtagatggtggaaatgctactggcttccccatgctctgccctgaggcctgactgcctcactccccttctcagttatgttccaggccccccgagcttcctggctggacagcttctctcctgggggccgttttgtcacagtgaccctgtgtttctagtcccaaatctgggtgctatagtctctttttagcgtggtggttgtcttagtcttttttggctgctaccacaagttaccttagactgggtaatttataaacagtggaaatttacttctcaccgttctgggggctggaagttttcatggtcaaggtgccagcagatttggtgtgtgatgagggctgctctctgcttcatagatggcatcttctggctgggtcctcacggtggaaggagtgaacaagctccctcaggccttttagaagggccccaatccacaagggctctcccatcatgacctcatcacctcccaaggccccaccttcttgtactgtggcactgcaaattaggtgtcagtgtaggagtttcaggagggatagaaacattcagaccatcccagcggtcaagtgttcatcctcttgagttcctccttattctgcttctggtttatcaggattcagccagtgcagcatggtacctgtattctgtggcacatcaccacatggtatttgccaagtatccatcacctgcacacgtgaaatcattgcccgtgggtcccgacatctggcgaagcatattcaaggatggcagaactgtcagagctggcacctctggttccttgtcatgtggcattacctagtaatccattttatgatagcaatggaaactcatttcttcaacaaacacctgagtggctgccgtgtgccagccgtctggggcccttggtgagaatggcatggtggtgcccatcagggcctgcctagcccgtgctctggacgggctcctgtgtgtcaggaacgacaatgctgtcatgacggtgaatgatttttttttttgccatcactccagccgctaacatttgcggagctcttcctcccgcacccccacctgacaaggccaagggtgaccttggccccaccctaggcggccaaggtcagaggttagctggcttgtctgggtcacacaaaatgcagcagaggttgaggtgagcacatgtccgtgacctggagcctgactccctctctgcgagtcttgactgctcttgcctagactctgtcctccccgagcccaaacgccagtcatcttcccttgtgggtgtccttcagcctggtgccatgctggtgactcagcagccgtccagggagtggaaacaattgagtgtgtgggttccctgtgtgggcatctctcttcacggcgaacaccctctgggtgttgcccacacgatgtcaaagcggctcttggaaggggtccttctcctttgtgggaagtttcagctgctgggctaacttgaattgtaactgtggttttgtgctcaggcccagatccccctaggcaagtgttgtgccatcagtaatcaaatgagaaataatcattttgaaaagcagatcctaaggcaggatggtcatggacactcactcccagctctttgtgcactcatgctttctggaagatggccatcctctgtgaaggttttcagcgcgtcatgcttggtacccacgtatccagagcatgtcgttttgaggtatttgcccaccgttgtgaaatccgtgccacccgagagcaggtcctgatgtggggctttcagaagtgggacctggggccgtacgcagtccttagggaggggccgtgtggcgttgtgcgtgtgaggggatagcacagggtgaggtgggggcccaagaaggaagtgacccacaaagaacagcctcctcttttggtccttgttcctgggatggctgggagtggcttctgtgtcgtccggccatttcccctgcggagaggctcctaccactgccgagaacctcatcattccacaaaaacaagaggccgcctggccatccagcgctccatgggaattctgtgtccccatagtcttgggctgaaggagggtgacattccttgctgacttctgcaggggtctcctcactgttaaagagcagattgaaagtgaagaacgtgggctaagtgtttaggtcgatatttaaccctgctaggttttggatactaagtgaaattgaggccattttggttgaagttgacagaaaccactatcagggatccccaagactaccccaggcttttctagaaagactctcagctaagatgtgttatggtaaaagcacacaaaacaaaatcagcaaagaaaattagcaagggcagaggcccatggggcgatgtcccgaggacaccaggcttgagcttccagaatcctctcccagcggggtcgtgcaggacgcacttaactccccgcacagtgagccgtgacagcgcgtgtgcagtgtcgtcgccaggaaagcacactagagactcggtgccagggtttttactgggggctgggcacatgggcaccctctgcctgcctcgtgcccagactctggactcccggagggaaggcaagttctcagcaccaaccctggtgcccacacaagcagctgagcacagggagcccctcctcagtgaggatggtgggcaccgtcccaacaccagccaggggccagccttgcacacaggcctctcaggatggtctccggcctgctgtgtagtctcttctgcacacaagcgtgagggcagcgcccccgcctcggctgtggggaggagccactgggacgtgagctctggtggcatgcagcagcttttgtctgtgtgtgcctaggacaaggccgtggcggagcctgtcagccgcctgctggagagcacgctcaggagcagccacctgcccagcagggttggagccctgcacggcgtcctctatgtgctggagtgcgacctgctggacgacactgccaagcagctcatcccggtcatcagcgactatctcctctccaacctgaaagggatcgcccagtgagtgggagcctggctggggctggggcgggggtctcagaatgagctgtgaaggaagcagcatcaccctctccaagtgcccaggctcctggccagatggcaggccaggtatcagtgggaacccaggtgggtgccatggctgaggtcagtgagacgcaagagcacaggtgcgtcctagaggcttcctcgggcacctccagcgagctggagctctcgcctctgctgctgtctcatgtggcgcttagcacactctcccacgtgcccattcctgactctgctctcgaggccatcggctctcattctctgctcccagaaccctgttattacccaggctagcctcctctctgcaccttccccgccctggcccagtacctccctcttgtttccactgtgattccgacctcaccttatcttaaagctgctggacggcaggttctgtacacacgtgtccttgacaaagcacggctggtgccgcaacccctcagcgagcaagtcaagctcttcacagcgatgtcttacaagcgcagagggctctgtgacaccctggtctcaccgccactcttccaaagtcgcagaggctttagcagagatgggcccagcctctctgagtcataggcttctgcacacgggagctgtctttagagggagggtggaatttcatcagccacccacatgggggagttgagggcaagaattaggagcaaagatgggaaggggtctgggaggaatggccagtgatcccctttgacaagtgggcaggaaacgggggctaggtcaaagttgagtggaagacctggagggagacgggaaggtctctgtaggcacagttcagacaggagggaggtgtgagccagggcacatgccggtggccgtctggcaggatttgggacatgctggagcagggacagcggctcatcaggggccattgccctcatccaggccagagtgtcacaagcccgtggggaggcccttctcgcctgtcatccttgctgggcagtgggtgctgtgctagcaggacaggcggacggctggcaactgtctctgcatccctggagcctggcatagggccaagtcacacggggcacaggcctgcaaatcaggcacatatgttggtgcagtgacgtgattttggggggcagccccagaacaggccccagacacaggccaaagccctgcctgtgctggtgtgttgggctgttctatggctcttgctgtgggcatggaggactcagggaaggagagttgaggtggtccaggagttgcgtttgggatgcagagagcttgtggcatccaggtagaaatggtgcgtggggctgacctcagcaccatgggcagaggggccgtgtcacgtgcctccgaggtggaggtgggaccacgtggtgacagatatacgcatcactgggcacgtttttgtgggtgttggggggcatcgtattggctcctctgttcacagtggccactcattcagtccctggctaccaggtcctcactgtgccatggggaaggccggcgctgtcgggggatcacagaaggcagcacgtcatgatggcatgtgccatgaaggaaaagcacagggcactcaggaagtagaggggactggcctggggtgtgggaatctagggcctcgttgagggacagagagaggaagtgtgtggtggccagcatggaggtggccacaggggaggctgagttaggccgagagggcagggcgttggggaggtagacgggctcagccactcagggagtggtcaagcagaggctgaagggtcaggccaggttgcaggggcctgggggagccactcagggtaggcgctcccgggagcccgcctggcccatagctctacactcccgcgtggggccggacatgctgtgaagccctctccacgttggatgggggtggctgagcctggatgctgtctcccgttttcagctgcgtgaacattcacagccagcagcacgtactggtcatgtgtgccactgcgttttacctcattgagaactatcctctggacgtagggccggaattttcagcatcaataatacaggtgagtgggccctggctgtcttcctctgcacacggggagtgggcttcccttctcttttccttgcaggatcataccagtgggccagttttgacttggtcgggaggaggcatgaacacctgagactgtgcagcgattctttgacacagaggcctttctccctgtgcagatgtgtggggtgatgctgtctggaagtgaggagtccaccccctccatcatttaccactgtgccctcagaggcctggagcgcctcctgctctctgagcagctctcccgcctggatgcagaatcgctggtcaagctgagtgtggacagagtgaacgtgcacagcccgcaccgggccatggcggctctgggcctgatgctcacctgcatgtacacaggtgagcatgtacacggtgcccataaggccagcccaagtcctgttcaagggaggcaggagcatgctcactcaagggacctcgactaggtgccctctgatttcacacttctggtgttgccccaagccggccccatcaccttgcaagaaaggctctggagcccccagggctggagtacctggtcagggttgaccgtccctgtggtcactcatcccatgtggctgagctgggctgggtcctgggcaagcaaggggctgatatcacctgctttcagatctccagggactcactggacccctgtgtacaaagcactgtctacagagcctattgggttgtatagaggtaaccttcgtactgaacacttttgttacaggaaaggagaaagtcagtccgggtagaacttcagaccctaatcctgcagcccccgacagcgagtcagtgattgttgctatggagcgggtatctgttctttttgataggtaagaagcgaagccccatccctcagccgttagcttccctagaactttggcctgaagctgtgcttttgtgtgtgtctgctgatcccctggcgctgttgctggagtcctgccagtgattccccaccacagcctgaccatgggctgccttggctcagggttccactggcgagctggtggtccttggaccccagcactcaggtgtagcgttgaccagttccaaggttgtcccagtgcctgcccatctctcctgagggctcagggacagtacctggcagttgggggtgtggcagggggcaggaatgaccagcctctgggagggtggggcagaagcctgtacagtgaggaggagctggctcagcctggctgcctatcgtgagaggggagcccacggggctgtgggaggggggccgtggtgcctgtgagcagggtgaggagcagcggcaggaggatgaaggtggaacccacacatgcatctttgagacccgtgtggtcagtggcttctgccccccaccaccccccactgctgtgcgtgcatagaattggcttccctcacctgctctggaagtgggttaggagcttggtagggctttttctcaaggacaagggcccctgatttgctctcaggcctcagtcctggcgacatggtggatctggagccttgttgcactgccttgcctgtgctctccaatcagggtggccagtggggagccatttggcttttctcaagagcatactcaggtggaccttgctccactgtttgaccagatgaggcattctgaacagccaagcctgtgctggtctgttttcatgttgatttttttttttcttttctttttgagatggagtttttcccttgtcacccaggctggagtgcaatggtgtgatctcggctcactgcaacctccgcctcccgggttcaagtgattctcctgcctcagcctccctagtagctgggattacaggcacacaccaccatgcccagctaatttttgtgtttttagtagagacggggtttcaccgtgttggctgggctggtctcgaactcctgaactcaagtgatccaccctccttggcctcccaaagtgctgggattgcaggcgtgagccactgcgcccggcccccatgtcgatttttaaatgcacctctgcatcgttcttcagtccccatatgctcactgagcaccactgcgactggcagacgggcacagggaggcgccacgaccagtcctggccttcaaggggcttgtggtctagtgggcccaatgctaggtggcgagtgctccaaagagtgtggtgcacgccttccgcttgaccgctctccagacgccacagggaggcacctcgcagctgaccacagatttctctctgtggagcagtgtcttcagagcggctgccatgccactgctgggcgagggtctgcgggcgggtagagccaggagcacctgtgaggaagtgcactgccattttcgtagctgcttcccgtgtgtctcagttacacacggctggcatgtgtgcactgatgagacgggaacgtgatggttgcttttcagcactgaaagggatactgctcagggggcgtgtttcaggatctggttagggaagaagcagcgagagcacagatggggccctgtgtggtaacaagaaaaaagtcctggttgacaacagtgccacgaagcgttagaacacatagggatgtttgtggagcatttgcatgtggaaagcagcaaaaacataatgggaacgggttcttttgttatgatttttaaaaatctcttttgtaacatccttcccgctgcgccgtttctgcatattcctttatgtagctttcaaactcctcttaggagttctggtccctacagggcgtgggagcccaggctttacgtagctttcaaactcctcttaggagttctggtccctacagggtgtgggagcccagggcctgtgccgagcagcctgcctccacgagctagacagaggaagggctggggttttgcctttttagtctcaaaattcgtactccagttgcttaggctctgactttccccacttggaaagtccctcacggccgagggtccctcccagccctgatttcacatcggcattttccccagtattagagccaaggccctccgcgggcaggtggggcagctgtgggagctggtgccagtctctgacctgcgtccctcctcccaggatcaggaaaggctttccttgtgaagccagagtggtggccaggatcctgccccagtttctagacgacttcttcccaccccaggacatcatgaacaaagtcatcggagagtttctgtccaaccagcagccatacccccagttcatggccaccgtggtgtataaggtgaggttgcatgtgggatggggatggagtgggaaagcctggaggtggagttgcctccgacttcccagcagattcgccagcagagcccagctcctccgctttaaagcagcaatgcctctggcccccaccccacccccgccacccaggcgcagcaggtgcttcccgtccccccagccctgacactcaggcacctgcttgctccttgcaggtgtttcagactctgcacagcaccgggcagtcgtccatggtccgggactgggtcatgctgtccctctccaacttcacgcagagggccccggtcgccatggccacgtggagcctctcctgcttctttgtcagcgcgtccaccagcccgtgggtcgcggcgatgtatcctctctgggtccctggtgctggccccgtttcccttgtcaacaccgaggctcatgtttcatgataaggttttgaaacctaacctttgcaaaaaccccacagatgccagggtgacaggccctcagccccagggaagtaaaatgctgacaggggtacagaaaggagcacgtccagacatttgctgaccagggcctctcagaggggccggtgtatggcaggagggtcgcagctgaggggcctttctgtggagggcctgggtgaggggagcgagggtgggcggtggtctctgcagacgtcccgcccactcgcgggctctgtgtggctgggcttctcctgacactgcttctcattagctttggtcattgtgcctcgatcgccctctcggggaaaggcttaagtaaagatccagttcccacccccagatgctggctgccaggagtttccctttccacagcccttccccaagacagaccacaagagcctccaagcagcacagttgtcctggtgctgacagcacagccttgcccggcgtgcctggcacggctctgccctcactgcattggagcagggctagtggaggccagcggaagcaccggccaccagcgctgcacaggagccaggccaggtgagtgctgccgagtgggtgccctgcctgcagggcatccagccagccaagggttgcaggaatggaggtggaggcgctgatgcagctggaggcatccaggtggcccttccggggctctgctcgctctccaggctccctggacccctttgtagactgtttcaggagaggaactcccaggtgaggacagggaggcagcattcccctcatttgccggcctttttccttaactcctgcaccagcctcccacatgtcatcagcaggatgggcaagctggagcaggtggacgtgaaccttttctgcctggtcgccacagacttctacagacaccagatagaggaggagctcgaccgcagggccttccagtctgtgcttgaggtggttgcagccccaggaagcccatatcaccggctgctgacttgtttacgaaatgtccacaaggtcaccacctgctgagcgccatggtgggagagactgtgaggcggcagctggggccggagcctttggaagtctgcgcccttgtgccctgcctccaccgagccagcttggtccctatgggcttccgcacatgccgcgggcggccaggcaacgtgcgtgtctctgccatgtggcagaagtgctctttgtggcagtggccaggcagggagtgtctgcagtcctggtggggctgagcctgaggccttccagaaagcaggagcagctgtgctgcaccccatgtgggtgaccaggtcctttctcctgatagtcacctgctggttgttgccaggttgcagctgctcttgcatctgggccagaagtcctccctcctgcaggctggctgttggcccctctgctgtcctgcagtagaaggtgccgtgagcaggctttgggaacactggcctgggtctccctggtggggtgtgcatgccacgccccgtgtctggatgcacagatgccatggcctgtgctgggccagtggctgggggtgctagacacccggcaccattctcccttctctcttttcttctcaggatttaaaatttaattatatcagtaaagagattaattttaacgtaactctttctatgcccgtgtaaagtatgtgaatcgcaaggcctgtgctgcatgcgacagcgtccggggtggtggacagggcccccggccacgctccctctcctgtagccactggcatagccctcctgagcacccgctgacatttccgttgtacatgttcctgtttatgcattcacaaggtgactgggatgtagagaggcgttagtgggcaggtggccacagcaggactgaggacaggcccccattatcctaggggtgcgctcacctgcagcccctcctcctcgggcacagacgactgtcgttctccacccaccagtcagggacagcagcctccctgtcactcagctgagaaggccagccctccctggctgtgagcagcctccactgtgtccagagacatgggcctcccactcctgttccttgctagccctggggtggcgtctgcctaggagctggctggcaggtgttgggacctgctgctccatggatgcatgccctaagagtgtcactgagctgtgttttgtctgagcctctctcggtcaacagcaaagcttggtgtcttggcactgttagtgacagagcccagcatcccttctgcccccgttccagctgacatcttgcacggtgaccccttttagtcaggagagtgcagatctgtgctcatcggagactgccccacggccctgtcagagccgccactcctatccccaggccaggtccctggaccagcctcctgtttgcaggcccagaggagccaagtcattaaaatggaagtggattctggatggccgggctgctgctgatgtaggagctggatttgggagctctgcttgccgactggctgtgagacgaggcaggggctctgcttcctcagccctagaggcgagccaggcaaggttggcgactgtcatgtggcttggtttggtcatgcccgtcgatgttttgggtattgaatgtggtaagtggaggaaatgttggaactctgtgcaggtgctgccttgagacccccaagcttccacctgtccctctcctatgtggcagctggggagcagctgagatgtggacttgtatgctgcccacatacgtgagggggagctgaaagggagcccctcctctgagcagcctctgccaggcctgtatgaggcttttcccaccagctcccaacagaggcctcccccagccaggaccacctcgtcctcgtggcggggcagcaggagcggtagaaaggggtccgatgtttgaggaggcccttaagggaagctactgaattataacacgtaagaaaatcaccattccgtattggttgggggctcctgtttctcatcctagctttttcctggaaagcccgctagaaggtttgggaacgaggggaaagttctcagaactgttggctgctccccacccgcctcccgcctcccccgcaggttatgtcagcagctctgagacagcagtatcacaggccagatgttgttcctggctagatgtttacatttgtaagaaataacactgtgaatgtaaaacagagccattcccttggaatgcatatcgctgggctcaacatagagtttgtcttcctcttgtttacgacgtgatctaaaccagtccttagcaaggggctcagaacaccccgctctggcagtaggtgtcccccacccccaaagacctgcctgtgtgctccggagatgaatatgagctcattagtaaaaatgacttcacccacgcatatacataaagtatccatgcatgtgcatatagacacatctataattttacacacacacctctcaagacggagatgcatggcctctaagagtgcccgtgtcggttcttcctggaagttgactttccttagacccgccaggtcaagttagccgcgtgacggacatccaggcgtgggacgtggtcagggcagggctcattcattgcccactaggatcccactggcgaagatggtctccatatcagctctctgcagaagggaggaagactttatcatgttcctaaaaatctgtggcaagcacccatcgtattatccaaattttgttgcaaatgtgattaatttggttgtcaagttttgggggtgggctgtggggagattgcttttgttttcctgctggtaatatcgggaaagattttaatgaaaccagggtagaattgtttggcaatgcactgaagcgtgtttctttcccaaaatgtgcctcccttccgctgcgggcccagctgagtctatgtaggtgatgtttccagctgccaagtgctctttgttactgtccaccctcatttctgccagcgcatgtgtcctttcaaggggaaaatgtgaagctgaaccccctccagacacccagaatgtagcatctgagaaggccctgtgccctaaaggacacccctcgcccccatcttcatggagggggtcatttcagagccctcggagccaatgaacagctcctcctcttggagctgagatgagccccacgtggagctcgggacggatagtagacagcaataactcggtgtgtggccgcctggcaggtggaacttcctcccgttgcggggtggagtgaggttagttctgtgtgtctggtgggtggagtcaggcttctcttgctacctgtgagcatccttcccagcagacatcctcatcgggctttgtccctcccccgcttcctccctctgcggggaggacccgggaccacagctgctggccagggtagacttggagctgtcctccagaggggtcacgtgtaggagtgagaagaaggaagatcttgagagctgctgagggaccttggagagctcaggatggctcagacgaggacactcgcttgccgggcctgggcctcctgggaaggagggagctgctcagaatgccgcatgacaactgaaggcaacctggaaggttcaggggccgctcttcccccatgtgcctgtcacgctctggtgcagtcaaaggaacgccttcccctcagttgtttctaagagcagagtctcccgctgcaatctgggtggtaactgccagccttggaggatcgtggccaacgtggacctgcctacggagggtgggctctgacccaagtggggcctccttgtccaggtctcactgctttgcaccgtggtcagagggactgtcagctgagcttgagctcccctggagccagcagggctgtgatgggcgagtcccggagccccacccagacctgaatgcttctgagagcaaagggaaggactgacgagagatgtatatttaattttttaactgctgcaaacattgtacatccaaattaaaggaaaaaaatggaaaccatcagttgttgctgtgtgaggcttgctttgcttcatgagaacctagaccttgctgagctggagtcttaggaagcagtctcctaagtgcttctccagcaggggcagaaactgtcccaccagctaacatctggcattatggagggtcccccaggcagctgccagcagggacaggccccgtgttttctgtagccagggatgaggaagtggccccagggcatgggcctggctgggtgcttctgcaagggccttcccaaaccacagtacaggtggtcttcctgccctgcagatgggagctgtgggagctgctggagctgctggagccttcatggtcaagtgacatcataagcttatatgacatacacaagcctcaggacttggcccatggcactgaagcaggtcatcaggcccagcacagagactagagctgtgttctcacagggcccaccacccttccacctccttggccattgacacctgcgtccctggcccagctgctcccaggtaacccccaaagcagctggcacatcccacctctggtgtggccggggctgctgtgtgtccgcagggcctgccccgtctattctagcttgtttgtcctgtctgaaccagcgcctactccaagaagcctctgctcagcccagcggggatgcttctaagctccggacgagcctctcggaagccttggtgattggtggtgtagtcatcttgggatgcagatgtcttaccaacctgcaagaacaaaaaccctgtggcttcctctggtgcagggtatttagtcaatgtttgctgaggtcccgtctggttctggctaattggcaggggtcgtccacccattctttccctgctctgctgtctgtgccaggagagacgggggccagtcggccaaggggccagctcctgctgcctgctcctcttgggcacgtgcgggggccccctttctctgagcagggatagggatcagtctgccggagggatgtggtggacaggcctaaagcatttggggcggggcatgccacttgagctccctaaatctgtctcctcataggtgacaccgctccagggccccccagtggcctctcctttcagagctacctaaattctggtcacttcagagaaatggagcacccccttctccctggtccaggtgtggacagcctggcacactgagcacacctggcatggctggtaatttcagaaagaagaggggccggggtccagtgggaagcagcggtgaacccctcgtgagtgggctttgcagtccctccccatgccacggcagagctgccctcaacacagccttcctcttcctcatcggagagcacaccctgtccccttgccgagctgtgccctgtgccttcggtggtatttgattttggctgctactggctttgttgggatctggaagtcgcttcccctgcgtggtgcgtggagcactgtaagtcagatgagggaagtagccagggtgaggtgagtaccgggtggagccgccactgaagggactgggtaggggggccttgcctctacatgatgtgacacagccaaccgaggacagaggaagccccgttcctgggggtgtggggtgcacccctcagggaagcctgcagtggggcctgaggaaaggcatcctccgcgagcccacgagtctggtccatgagcaccgtgacagtgtctgtgggtagaggtggacccggccttgtgtcatcaccaggacctcttttgggaaaccatgtggacatcgcttgcgggtcccccaggctctgcagccccagcagcct

SEQ ID NO: 3 - DNA, 10081 bp, Mus musculus
gcactcgccgcgagggttgccgggacgggcccaagatggctgagcgccttggttccgcttctgcctgccgcgcagagccccattcattgccttgctgctaagtggcgccgcgtagtgccagtaggctccaagtcttcagggtctgtcccatcgggcaggaagccgtcatggcaaccctggaaaagctgatgaaggctttcgagtcgctcaagtcgtttcagcagcaacagcagcagcagccaccgccgcaggcgccgccgccaccgccgccgccgcctccgcctcaaccccctcagccgccgcctcaggggcagccgccgccgccaccaccgccgctgccaggtccggcagaggaaccgctgcaccgaccaaagaaggaactctcagccaccaagaaagaccgtgtgaatcattgtctaacaatatgtgaaaacattgtggcacagtctctcagaaattctccagaatttcagaaactcttgggcatcgctatggaactgtttctgctgtgcagtgacgatgcggagtcagatgtcagaatggtggctgatgagtgcctcaacaaagtcatcaaagctttgatggattctaatcttccaaggctacagttagaactctataaggaaattaaaaagaatggtgctcctcgaagtttgcgtgctgccctgtggaggtttgctgagctggctcacctggttcgacctcagaagtgcaggccttacctggtgaatcttcttccatgcctgacccgaacaagcaaaagaccggaggaatcagttcaggagaccttggctgcagctgttcctaaaattatggcttcttttggcaatttcgcaaatgacaatgaaattaaggttctgttgaaagctttcatagcaaatctgaagtcaagctctcccaccgtgcggcggacagcagccggctcagccgtgagcatctgccaacattctaggaggacacagtacttctacaactggctccttaatgtcctcctaggtctgctggttcccatggaagaagagcactccactctcctgatcctcggtgtgttgctcacattgaggtgtctagtgcccttgctccagcagcaggtcaaggacacaagtctaaaaggcagctttggggtgacacggaaagaaatggaagtctctccttctacagagcagcttgtccaggtttatgaactgactttgcatcatactcagcaccaagaccacaatgtggtgacaggggcactggagctcctgcagcagctcttccgtacccctccacctgaactcctgcaagcactgaccacaccaggagggcttgggcagctcactctggttcaagaagaggcccggggccgaggccgcagcgggagcatcgtggagcttttagctggagggggttcctcgtgcagccctgtcctctcaagaaagcagaaaggcaaagtgctcttaggagaggaagaagccttggaagatgactcggagtccaggtcagatgtcagcagctcagcctttgcagcctctgtgaagagtgagattggtggagagctcgctgcttcttcaggtgtttccactcctggttctgttggtcacgacatcatcactgagcagcctagatcccagcacacacttcaagcagactctgtggatttgtccggctgtgacctgaccagtgctgctactgatggggatgaggaggacatcttgagccacagctccagccagttcagtgctgtcccatccgaccctgccatggacctgaatgatgggacccaggcctcctcacccatcagtgacagttctcagaccaccactgaaggacctgattcagctgtgactccttcggacagttctgaaattgtgttagatggtgccgatagccagtatttaggcatgcagataggacagccacaggaggacgatgaggagggagctgcaggtgttctttctggtgaagtctcagatgttttcagaaactcttctctggcccttcaacaggcacacttgttggaaagaatgggccatagcaggcagccttccgacagcagtatagataagtatgtaacaagagatgaggttgctgaagccagtgatccagaaagcaagccttgccgaatcaaaggtgacataggacagcctaatgatgatgattctgctcctctggtacattgtgtccgtcttttatctgcttcctttttgttaactggtgaaaagaaagcactggttccagacagagacgtgagagtcagtgtgaaggccctggccctcagctgcattggtgcggctgtggcccttcatccagagtcgttcttcagcagactgtacaaagtacctcttaataccacggaaagtactgaggaacagtatgtttctgacatcttgaactacatcgatcatggagacccacaggtccgaggagctactgccattctctgtgggacccttgtctactccatcctcagtaggtcccgtctccgtgttggtgactggctgggcaacatcagaaccctgacaggaaatacattttctctggtggactgcattcctttactgcagaaaacgttgaaggatgaatcttctgttacttgcaagttggcttgtacagctgtgaggcactgtgtcctgagtctttgcagcagcagctacagtgacttgggattacaactgcttattgatatgctgcctctgaagaacagctcctactggctggtgaggaccgaactgctggacactctggcagagattgacttcaggctcgtgagttttttggaggcaaaagcagaaagtttacaccgaggggctcatcattatacagggtttctaaaactacaagaacgagtactcaataatgtggtcatttatttgcttggagatgaagaccccagggttcgacatgttgctgcaacatcattaacaaggcttgtcccaaagctgttttacaagtgtgaccaaggacaagctgatccagttgtggctgtagcgagggatcagagcagtgtctacctgaagctcctcatgcatgagacccagccaccatcacacttttctgtcagcaccatcaccagaatctatagaggctatagcttactgccaagtataacagatgtcaccatggaaaacaatctctcaagagttgttgccgcagtttctcatgaactcattacgtcaacaacacgggcactcacatttggatgctgtgaagccttgtgtcttctctcagcagcctttccagtttgcacttggagtttaggatggcactgtggagtgcccccactgagtgcctctgatgagtccaggaagagctgcactgttgggatggcctccatgattctcaccttgctttcatcagcttggttcccactggatctctcagcccatcaggatgccttgattttggctggaaacttgctagcagcgagtgcccccaagtctctgagaagttcatggacctctgaagaagaagccaactcagcagccaccagacaggaggaaatctggcctgctctgggggatcggactctagtgcccttggtggagcagcttttctcccacctgctgaaggtgatcaatatctgtgctcatgtcttggacgatgtgactcctggaccagcaatcaaggcagccttgccttctctaacaaaccccccttctctaagtcctattcgacggaaagggaaggagaaagaacctggagaacaagcttctactccaatgagtcccaagaaagttggtgaggccagtgcagcctctcgacaatcagacacctcaggacctgtcacagcaagtaaatcatcctcactggggagtttctaccatctcccctcctacctcaaactgcatgatgtcctgaaagccactcacgccaactataaggtcaccttagatcttcagaacagcactgaaaagtttggggggttcctgcgctctgccttggacgtcctttctcagattctagagctggcgacactgcaggacattggaaagtgtgttgaagaggtccttggatacctgaaatcctgctttagtcgagaaccaatgatggcaactgtctgtgtgcagcagctattgaagactctctttgggacaaacttagcctcacagtttgatggcttatcttccaaccccagcaagtctcagtgccgagctcagcgccttggctcttcaagtgtgaggcccggcttatatcactactgcttcatggcaccatacacgcacttcacacaggccttggctgacgcaagcctgaggaacatggtgcaggcggagcaggagcgtgatgcctcggggtggtttgatgtactccagaaagtgtctgcccaattgaagacgaacctaacaagcgtcacaaagaaccgtgcagataagaatgctattcataatcacattaggttatttgagcctcttgttataaaagcattgaagcagtacaccacgacaacatctgtacaattgcagaagcaggttttggatttgctggcacagctggttcagctacgggtcaattactgtctactggattcagaccaggtgttcatcgggtttgtgctgaagcagtttgagtacattgaagtgggccagttcagggaatcagaggcaattattccaaatatatttttcttcctggtattactgtcttatgagcgctaccattcaaaacagatcattggaattcctaaaatcatccagctgtgtgatggcatcatggccagtggaaggaaggccgttacacatgctatacctgctctgcagcccattgtccatgacctctttgtgttacgaggaacaaataaagctgatgcagggaaagagcttgagacacagaaggaggtggtggtctccatgctgttacgactcatccagtaccatcaggtgctggagatgttcatccttgtcctgcagcagtgccacaaggagaatgaggacaagtggaaacggctctctcggcaggtcgcagacatcatcctgcccatgttggccaagcagcagatgcatattgactctcatgaagcccttggagtgttaaataccttgtttgagattttggctccttcctccctacgtcctgtggacatgcttttgcggagtatgttcatcactccaagcacaatggcatctgtaagcactgtgcagctgtggatatctggaatcctcgccattctgagggttctcatttcccagtcaaccgaggacattgttctttgtcgtattcaggagctctccttctctccacacttgctctcctgtccagtgattaacaggttaaggggtggaggcggtaatgtaacactaggagaatgcagcgaagggaaacaaaagagtttgccagaagatacattctcaaggtttcttttacagctggttggtattcttctagaagacatcgttacaaaacagctcaaagtggacatgagtgaacagcagcatacgttctactgccaagagctaggcacactgctcatgtgtctgatccacatattcaaatctggaatgttccggagaatcacagcagctgccactagactcttcaccagtgatggctgtgaaggcagcttctatactctagagagcctgaatgcacgggtccgatccatggtgcccacgcacccagccctggtactgctctggtgtcagatcctacttctcatcaaccacactgaccaccggtggtgggcagaggtgcagcagacacccaagagacacagtctgtcctgcacgaagtcacttaacccccagaagtctggcgaagaggaggattctggctcggcagctcagctgggaatgtgcaatagagaaatagtgcgaagaggggcccttattctcttctgtgattatgtctgtcagaatctccatgactcagaacacttaacatggctcattgtgaatcacattcaagatctgatcagcttgtctcatgagcctccagtacaagactttattagtgccattcatcgtaattctgcagctagtggtctttttatccaggcaattcagtctcgctgtgaaaatctttcaacgccaaccactctgaagaaaacacttcagtgcttggaaggcatccatctcagccagtctggtgctgtgctcacactatatgtggacaggctcctgggcacccccttccgtgcgctggctcgcatggtcgacaccctggcctgtcgccgggtagaaatgcttttggctgcaaatttacagagcagcatggcccagttgccagaggaggaactaaacagaatccaagaacacctccagaacagtgggcttgcacaaagacaccaaaggctctattcactgctggacagattccgactctctactgtgcaggactcacttagccccttgcccccagtcacttcccacccactggatggggatgggcacacatctctggaaacagtgagtccagacaaagactggtacctccagcttgtcagatcccagtgttggaccagatcagattctgcactgctggaaggtgcagagctggtcaaccgtatccctgctgaagatatgaatgacttcatgatgagctcggagttcaacctaagccttttggctccctgtttaagccttggcatgagcgagattgctaatggccaaaagagtcccctctttgaagcagcccgtggggtgattctgaaccgggtgaccagtgttgttcagcagcttcctgctgtccatcaagtcttccagcccttcctgcctatagagcccacggcctactggaacaagttgaatgatctgcttggtgataccacatcataccagtctctgaccatacttgcccgtgccctggcacagtacctggtggtgctctccaaagtgcctgctcatttgcaccttcctcctgagaaggagggggacacggtgaagtttgtggtaatgacagttgaggccctgtcatggcatttgatccatgagcagatcccactgagtctggacctccaagccgggctagactgctgctgcctggcactacaggtgcctggcctctggggggtgctgtcctccccagagtacgtgactcatgcctgctccctcatccattgtgtgcgattcatcctggaagccattgcagtacaacctggagaccagcttctcggtcctgaaagcaggtcacatactccaagagctgtcagaaaggaggaagtagactcagatatacaaaacctcagtcatgtcacttcggcctgcgagatggtggcagacatggtggaatccctgcagtcagtgctggccttgggccacaagaggaacagcaccctgccttcatttctcacagctgtgctgaagaacattgttatcagtctggcccgactccccctagttaacagctatactcgtgtgcctcctctggtatggaaactcgggtggtcacccaagcctggaggggattttggcacagtgtttcctgagatccctgtagagttcctccaggagaaggagatcctcaaggagttcatctaccgcatcaacaccctagggtggaccaatcgtacccagttcgaagaaacttgggccaccctccttggtgtcctggtgactcagcccctggtgatggaacaggaagagagcccaccagaggaagacacagaaagaacccagatccatgtcctggctgtgcaggccatcacctctctagtgctcagtgcaatgaccgtgcctgtggctggcaatccagctgtaagctgcttggagcaacagccccggaacaagccactgaaggctctcgataccagatttggaagaaagctgagcatgatcagagggattgtagaacaagaaatccaagagatggtttcccagagagagaatactgccactcaccattctcaccaggcgtgggatcctgtcccttctctgttaccagctactacaggtgctcttatcagccatgacaagctgctgctgcagatcaacccagagcgggagccaggcaacatgagctacaagctgggccaggtgtccatacactccgtgtggctgggaaataacatcacacccctgagagaggaggaatgggatgaggaagaagaggaagaaagtgatgtccctgcaccaacgtcaccacctgtgtctccagtcaattccagaaaacaccgtgccggggttgatattcactcctgttcgcagtttctgcttgaattgtacagccgatggatcctgccatccagtgcagccagaaggacccccgtcatcctgatcagtgaagtggttcgatctcttcttgtagtgtcagacttattcaccgaacgtacccagtttgaaatgatgtatctgacgctgacagaactacggagagtgcacccttcagaagatgagatcctcattcagtacctggtgcctgccacctgtaaggcagctgctgtccttggaatggacaaaactgtggcagagccagtcagccgcctactggagagcacactgaggagcagccacctgcccagccagatcggagccctgcacggcatcctctatgtgttggagtgtgacctcttggatgacactgcaaagcagctcattccagttgttagtgactatctgctgtccaacctcaaaggaatagcccactgcgtgaacattcacagccagcagcatgtgctggtaatgtgtgccactgctttctacctgatggaaaactaccctctggatgtgggaccagaattttcagcatctgtgatacagatgtgtggagtaatgctgtctggaagtgaggagtccaccccctccatcatttaccactgtgccctccggggtctggagcggctcctgctgtctgagcagctatctcggctagacacagagtccttggtcaagctaagtgtggacagagtgaatgtacaaagcccacacagggccatggcagccctaggcctgatgctcacctgcatgtacacaggaaaggaaaaagccagtccaggcagagcttctgaccccagccctgctacacctgacagcgagtctgtgattgtagctatggagcgagtgtctgttctctttgataggatccgcaagggatttccctgtgaagccagggttgtggcaaggatcctgcctcagttcctagatgacttctttccacctcaagatgtcatgaacaaagtcattggagagttcctgtccaatcagcagccatacccacagttcatggccactgtagtttacaaggtttttcagactctgcacagtgctgggcagtcatccatggtccgggactgggtcatgctgtccctgtccaacttcacacaaagaactccagttgccatggccatgtggagcctctcctgcttccttgttagcgcatctaccagcccatgggtttctgcgatccttccacatgtcatcagcaggatgggcaaactggaacaggtggatgtgaaccttttctgcctggttgccacagacttctacagacaccagatagaggaggaattcgaccgcagggctttccagtctgtgtttgaggtggtggctgcaccaggaagtccataccacaggctgcttgcttgtttgcaaaatgttcacaaggtcaccacctgctgagtagtgcctgtgggacaaaaggctgaaagaaggcagctgctggggcctgagcctccaggagcctgctccaagcttctgctggggctgccttggccgtgcaggcttccacttgtgtcaagtggacagccaggcaatggcaggagtgctttgcaatgagggctatgcagggaacatgcactatgttggggttgagcctgagtcctgggtcctggcctcgctgcagctggtgacagtgctaggttgaccaggtgtttgtctttttcctagtgttcccctggccatagtcgccaggttgcagctgccctggtatgtggatcagaagtcctagctcttgccagatggttctgagcccgcctgctccactgggctggagagctccctcccacatttacccagtaggcatacctgccacaccagtgtctggacacaaaatgaatggtgtgtggggctgggaactggggctgccaggtgtccagcaccattttcctttctgtgttttcttctcaggagttaaaatttaattatatcagtaaagagattaattttaatgt

SEQ ID NO: 4 - DNA, 168001 bp, Macaca mulatta
  misc_feature (8793)..(8847): n is a, c, g, or t
  misc_feature (11951)..(12154): n is a, c, g, or t
  misc_feature (13732)..(14136): n is a, c, g, or t
  misc_feature (17298)..(17496): n is a, c, g, or t
  misc_feature (18992)..(19354): n is a, c, g, or t
  misc_feature (30627)..(32143): n is a, c, g, or t
  misc_feature (37233)..(37640): n is a, c, g, or t
  misc_feature (56356)..(56601): n is a, c, g, or t
  misc_feature (66207)..(66274): n is a, c, g, or t
  misc_feature (72471)..(72755): n is a, c, g, or t
  misc_feature (82607)..(83313): n is a, c, g, or t
  misc_feature (108855)..(108874): n is a, c, g, or t
  misc_feature (131685)..(132274): n is a, c, g, or t
  misc_feature (143991)..(145162): n is a, c, g, or t
  misc_feature (147894)..(148387): n is a, c, g, or t
tacaggcgtgagccaccgcacccagctggaacttaatttttttaaagatcgtgttgctctatcgcccaagctggagtgcagtggtgcaaccatagctcacttgcagccacaaattcctggtttcaggtgatcctcctacatcagcctcccaagaactgggaactaacggctgtttctctgctgtccttctcaagagaagggagggagacaatgctgggtttccctttgggacaggctctgagacaaggtggaggtgctgcttgtggccacagagcaggggactctgggttgcaggtgtggcctggcttgagtaggctttagtgggcttctctctgcctgcaccacccccgggctgggtggttgtctctgaggccaaccctactccctaatgggcaggctggacagctgccctctctgtttgcccctctaccacccaaaaggcgggaggctctggagaccaggaccctgcctgcgccggcctgtgccccaggcgtgagggggtgccccacagatctctgctgagctgaggctgaatggcaccccttgggggtcctgccaggtcagagcagggtgctttcccatacagaaacgcccccaggtcgggactcattcctgtgggaggcgtcttgtggccacaactgcttctcgctgcactaatcacagtgcctctgtgggcagcgggcgctgaccatccgggcctgcctcagaccctctcctcccttccggggcgctgcgctgggaccgatggggggcgccaggcctgtgggcaccgccctgcaggggccgctccagctcactggggggtggggagggtcacacttggggtcttcagatggcgccgaccacgcgcaatctctgcgctctgcgcaggggctcgcccaccctctccccgtgcagcgagtccccagcaggctccccgcagggctgtccaggtgagcctggctctggccgcgggccagtgtggcgggcgggcaagccccgaggccacctcggctcagagcccacggccggctctcgcccagctccagacgtctgcgagggttccattccgcttgggccggcgccccgcgcgccgcgccctggccccgcccctccctcatcccgccccctctgcaccccacccctccctggccccgccctccgcgccccacctctcatcttcccgccccgcccccagccacgcccctcacggtcagccccctcccctatccgccccgcctctcatcgtctcgcctcgctccgcccctcagccgtcccgcccctcagccgccctgcctaatgtccccgcccccagcctcgccccgctccgccccagcctcgccccgccccgcccctcaggcgccctgcctgctgtgccccgccccagcctcgccacgcccctcgttaccatgtagtcccgccccgtcccttccgcgtcccgcctcgcccctaccccttcacagcttcgccccaccccattacagtcttgccacgccccgtcccctgtccgttgagccctgctccttcgcccaggtggggcgctgcgctgtcagaggctttggtggctctgtgaggcagaacatgcgggcgcagggactggctggctccctggccagtcattggcagagtccgcaggctagggctgtcaatcatgctggccggcgtggccccgcctccgccggcgcagcgtcttgagacgcaaggcgccgcgggggctgccgggacgggtccaagatggacggccgcttcggttccgcttttacccgcggcccagagccccattcattgccccggtgctgagcggcgctgcgagtcggcccgaggcctccggggactgcctagccgggcgggagaccgccatggcgaccctggaaaagctgatgaaggccttcgagtctctcaagtccttccagcagcagcagcagcagcagcagcaacagccgccgccgccgccgccgccgcctcctcctcctcctcagcttcctcagccgccgcaggcacagccgatgctgcctcagccgcagccgcccccgccgccgcccccgccaccacccggcccggctgtggctgaggagccgctgcaccgaccgtgagtttgggcccgctgcagctccctgtcccggcgggtcccagcctacggcggggatggcggaatcctgcagcctgcgggccggcgacacgaacccccccggccccgcagcgacagagtgacccagcaacccagagccaatgagggacacccgccccctcctgcggcgagaccttcccccacttcagccccggtcccgcacttgggtcttgtcctcccgcgaggggaggcagaacctcgttgggacctgtcctgaattcacggaggggagtcacggcctcagccctctcgccctttccagggtgcgaagagttggggcgaaaacttgtttctttttatttgcgagaaactagggcgggggtttaactgtgttctgaagagaacttggaagagccgagatttgctcagggccacttccctcatctagtcagagagggaagagggctgggggcgcgggacacctcgagaggaggcggggtttggagctagagagatgtgggggcagtggatgacataatgcttttaggacgcctcggcgggagtggctggagtggggggcggggagtgagggcgcgtccaatgggagatttattttccaagtggcatttaaaacagcctgagatttgaggctcttcctacattctcagggcatttcatttagttcatgatcgcggtggtagtaacacgattttaagcaccacctaagagacctgctcatctaagcgcaagttagtgtgcaggcatttgaatgagttgtggtcgccaaataagtggtgaacttacgtggtattaataaaattatcttaaatattaggaagagttgattgaagtttattgcctgtttgtgttgggaataaaactaacacgttgctgagggggaggttaattgccgagggatgaatgaggtatacattttaccagtattgcagtcaggcttgccagaatatgggaggtctgcagactccgtggacatctcatgtgccagtgaaagggtttctgttcgcctcattgctgacagcttgttactttttggaagctagaggtctctgttgcttgttcttggggagaatttttgaaacagaaaaagagaccattaaaacatctagcggaaccccaggacgtgggagtgtgtgctgagtgtttagcaggatttaggaagtactccgctgcagttcaggcctttctcttacctctcagtgttctatttccgatctggacgtgtatcagatggcatttgataagaatatctctattaagactgattaatttttagtaatatttcttgttctttgtttctgttatgatccttgccttgtcttgaaagtttaattagaagaggaggatttggagagcagtgttagcttatttgttagagtaaaatttaggaataaattcttctaaaggatggaaaaactttttggatatttagagaaatttttaaacaatttggcttatctcttcagtaagtaatttctcatccttccagaaatttaatgtagtgcctttctaggaggtaggtgtcatagaagttcacacattgcatgtatcttgtgtaaacactaaactgggctcctgatgggaaggaagacctttctgctgggctgcttcagacacttgatcattctgaaaatatgccgtctctttcctgtgctgatttgatagaacctgcgtttgcttatcttcaaaatatgggtatcaagaaatttcctttgctgcctttacaaaggagatagattttgtttcattactttattttaaggtaatatatgattaccttattttaaaaatttaatcaggcctggcaaggtggctcatgcctttaatccgagcactttgggaggcttaggcggatgaatcacctgaggtcaggagttcgagaccagtctggctaacatggtgaaaccccatctctactaaaagtacaaaaattagttggtcatggtggcacgtgcctgtaatgccagctacctgggaggctgaggcaggaaaatcgctggaacccgggaggcagaggctgcagtgagctgagactgcgccactgcactccagcctgggtgacagagcgagactcttgtctcaaaaaaaaaaaaattattatttttgcataagtaatacattaacatgacacaaattccgtaattacaaaagagcaatacttaaaatatcttccttccacccctttcatctgagtacctaactttgtccccaagaacaagcactattacagttcctcctgtatcctgccagatataatctatgcatattgtaagatagatttaaaatgctgtaaaaataaaagtagtttacagtaataattttttttctttattttttttgagatgtagtctcacattgtcacccaggctggagtgcggtggtatgatcttggctcactgcaacctccacctcccaggttcaaacgattctcctgcctcagcctccagagtagctgggattacaggtgctcaccaccatgtccagctgatttttgtatttttagtagagatggggtttcaccatgttggccaggctggtcttgaactcctgacctcggaatccatccacctcggcctcccaaagtgctggggttacaggtgtgagccactgcccctggctagaataataacttttaaaggttcttagcattctctgaaatcaactgcattaggtttatttatagttattttaaataaaatgcatatttgtcatatttgtatgtattttgctgttgagaaaggaggtattcgctaattttgagtaacaaacactgctcacaaagtttggattttggcatttctgttcatgtgcttcagccaaaaaatcctcttctcaaagtaagattgactaaagcaatttagaaagtatctgtttttatggctcttgctcttttgtgtggaactgtggtgtcatgccatgcatgggcctcagtctaagtatgagcgtatgtgctctgctcagcatacaggatgtgggagttccgtgtggggctggccacagtctcagcaaatctagcatgcttgggagggtcctcacagtaattaggaggcaactgatacttgcttctggcaattccttattctccttcagattcctatccggtgtttccctgactttattcattcatcagtaaatatttactaaacatgtactatgtacctagcactgttctagatgcagggctcagcagtgagcagacaaagctgtgccctcatgaagctttcattctaatgaaggacatagacaataagcaagatagataagtaaaatatacagtatgttaataagtggaggaatgtcaaagcagggaaggggatagggaaatgtcagggttaatcaattgttaacttatttttattaaaaaaaaatttttttaagggctttccagcaaaacccagaaagcctgctggacaacttccaaaaaaactgtagcactaagtgttgacatttttattttattttattttattttgttttgttttgttttttgaggcagtcttgctttgtcagccaggctgcagtgcactggtgtgatcttagctcactgcaacctctgcctgttgggttcaagcgattcttatgcctcagcctcctgattagctgggattatagacatgcaccgtcccgcctgggtaattttttttttttccccctgagacagagtcttgctctgtcgcccaggctggagtgcagtggcacaatcttggctcactgcaagctccgcctcccaggttcatgccattctcctgcctcagcctcccaggtagctgggactacaggcgcctgccaccacgcccagctaattttttgtatttttagtagagatggggtttcactgtgtcagccaggatggtcttgatctcctcacctcgtagtccgccccccttggcctcccaaagtgctgggattacaggcgtgagccaccgcgcccggcctgtaattttttttttttttttttgagacagagtcttgctttgttgctaggctggactgcagtggtgtgatcttggcacactgcaacctctgcctcccgggttcaagcgattctcctgcctcagcttcccgagtagctgggactacaggcacgtgccatcacgcttggctactttttgtatatttagtagaaacggggtttcaccatgttagctgagatgatctcgatctcttgacctcgtgatccgcccgcctcggcctcccagagtgctgggattacaggtgtgagccactgtgcctgaccacgcctgggtaatttttgtatttttagtagagacgggatttcaccacgatggccagactggtctcgaactcccagcctcatgtgatctgcctgcctaggcctcccaaagtgctaggattacaggcatgagccaccatgactggccagtgttgatattttaaatagggtgttcagggaaggtccactgaggtgacagctgtttttttggggggagtggtgggacagggccttgctctttaacccaggctggaatacagcatcacaatcgtagcttactgcagccttgaactcctaggctcaagtgatcttcccaccttgacctcacaacgtgttgggactgtaggtgtgagtcaccatgcctggccagatgatggctttgagtaaagacctcaggcgagttaagagtctagcgtaaaggtgtatggagtaggggtattccagatagggggaacaggtccaaagtcttcctgtttgaggaatagcaagggtgccattttagttgggtgaattgagtgagggcgacatttgtagtaagaggtaaagtccaagaggtcaagggagtgccatatcagaccaatactacttgccttgtagatggaataaagatattggcatttatgtgagtgagatgggatgtcactggaggattagaggagaggagtagcatgatctgaatttcattcttaagtgaactctggctgacaacagagtgaaggggaacatggacaaaagcagaaaccagttaggaagccactgcagtgctcagataagcgtggtgggttctgtcagggtaccggctgtgggcagtgtgaggaatgactggattttgaatgcagaagcaactgtacttgttgaactctgctaagtataactatttagcagtagctggcattatcagttaggtttgtattcagctgcaagtaacagaaaattctgctgcaatagcttaaactggtaacaagaaagagcttatcagaagacaaaaataagtctgtttggggaaattcaacaataagttaaggaacccaggctctttctttttttttttgaaatggagttttgctcttgtcacccaggccggagtgcaatgatgcgatcttggctcactataacctccgcctcctaggttccagtgattcttctgcctcagccttccaggtatctgggattagaggcgcacgcacaccaccatgcccagctaatttttgtatttttagtaggcacggggtttcatcatgttggccaggctggtctcgaactcctgaccttaggtgatcaacccgcctcagcctgccaaagtgctgagattacaggtgtgagccactgcactcggtcagaacccaggctcttttttacacttagcttgcaaacccttgttctcattcttttccctttgtatttttattgtcgaattgtaacagttctttgtgtattctggatactggattcttatcagatagatgatttgtgaaaacattctctcttcctttggattgtctttttactttcttgatcatgtcttttgaagtgtgaaagtttttaattttgatgaagtctagtttatctagtttgtccttggttgctatgctttgagtgtcatatctaagaaatcattgtctaatccaaagtcaaaaaggtttacccgtatgttttcttctaagaattttagagttttacatttaggtctgatccattttgagttaatttttatatgtggttcaggtagaagtccaacttcattcttttgcatgtggttattcagttgtcccagcacagtttgttgaagagactgtactttccccatggaattgtcttagcatccttgttgaaaattcattgtccttgattgtatagatttatttcttgactctcagttctacctattggtctttatgttgatcctgtgccagtaccatacagtcttgattactgaagtttgtgtcacaatttaaattcatgaaatgtgagttctccaactttgttctttctcaagattgatttggccatgctgggtcccttgcatttccatatggattgtaggatcaacttgtcagtttctacaaagaagccaaggaggattctgagagggattgtgttgaatctgtagatcaacttggggagtattaccatcttaacagtattgtcttccatctctgaactgggcaaactttgtgtaaatggtcagatttaggtatttcaggctgtgtgggcacaatgtctctgtcacagctactcagctctgccattgtagcgtgaaatagccataagcaatatgtatgagtgtctgtgttccagtataattttattaatgacaaggaaatttgaatttcgtgtaattttcacctgtcatgaaatattatttggtttttttggtcaatcatttaaaaatgtaaaaacttttcttagcttttgaactggccaaacatatgcaggttataattttcccactcctagattaaaatatgataggaccacctttgaaaagcatgtnnnnnnnnnnnnnnnnnnnnnnnnnnnnnnnnnnnnnnnnnnnnnnnnnnnnnnnaacactttgggaggccgagccaggtggatcacttgaggccaggagttcgagaccagcctaaccaacatggtgaaaccccatctctactaaaaataaaaaaattagctgggggtggtggtgggtgtagggtccagccctatggggcttagcgggtgttctccccgtgcggggagacgagagatcttaagaaataaagacacggccgggcgcggtggctcacgcctgtaatcccagcactttgggaggccgaggcgggcggatcacaaggtcaggagatcgagaccacggtgaaaccccgtctttactaaaaatacaaaaaattagcggggcgcggttgtgggcgcctgtagtcccagctactcgggaggctgaggcaggagaatggcgtgaacccgggaggaggagcttgcagtgagccgagatcgcgccactgcactccagacggggcgacagagcgagactcctgtctcaaaaaaaaaaaaaaaaaaaaaaagaaaagcatgtttttttttttttgagatggagtttcgcttttgttgcccaggctggagtgcagtggcgcgatctcgggtcaccacaacctctgcctcccaggttcaagcgattctcctgcctcagcctcccttgtagctgggattacaggcatgtgccaccatgcccggctaattttgtatttttagtagagacggggtttctccaggttggtcaggctggtctcgaactcctgacctcaggtgatctgcctgcctcggcctcccgaagtgctgggattacaggcgtgagccactctgcccagccagaaagcatttcttttttggctgtttttttgttgttttttttaattaactagttttgaaaattatagaagttacacatatatgttataaaaacatctccaagcagcacagaagatgaaaaacaaagcccttcttgcaagtctgtcatctttgtctaacttcctaagaacaaaagtatttcttgtgtcttcttcccagattttaatatgcatatacaagcatttaaatatgtcattttttgttggcttgactgagatcacattacatacgtatttttttacttaacaatttgagtacaatgtgtcatggaaattgttccatagcagtatctgtaattcttattaattgctgtgtaatattgtagaatttctttttaaaagaggacttttggagatgtaaaggcaaaggtctcccattattctggctgtacaacgttctggtgacatattctctctaccctgagaggtccccatacccatcacctccatttcctgtaaataagtcaaccacttggtaaactacctttgaatggatccacactcaaaacatttagtcttattcagacaacaaggaggaaaaataaaataccttataaagcactgtttcatatgtattaaattggatcaatttgcgtgctagaatgtatgttagagacatgatatgcccataggtccttgctatcacggtgaggtctcagggacagcagtttggtatcatttggtatctcataagcagactctgtctgcctgacttaacaaatcagagtctgcgttttaacaggttcagtgagtgacttacatgcacattggagtttgggaagctccactataggtgcttagaccttacctttgttgttgctaataacaatgcaagcatttgggaggaagacctgtgttgctcgtatgtgtccaggtgtagctgaggtggccttgcttgtctgctgtagggccattgagcatttgcgtagctgtgatgaatgagctgaggtgagcctgcggagagctcccagccattggtagtgggacttgcttagatgaactagaaggacctgagcatccactttggggaaaaacaaccgaatgaagggagaggcaacatgcagttttatttagggtacgaaggagagctgtggttagaaggtgacatttgagtggaaagggggcaacccatgtgtggagcgggagaagagcggtccaggcagagttaacagaaggcagaaatgctttccatctttgaaaactaggaaggatgccagtggctgaagtaagatgaaggacagaaataggggatgaggcttcgagagatgagaggttagagacgagggtcttgtgcaccaagataagcttgtgtggtcaaaacaagtagtttcgtttttgtttttaaaagatcactttggctgggtgcaatggttcatgcctgtaataccagtactttgagaggctgtggtgggaggattgcctgaagccaggggaccagcgtagccaacatagcagcacctataaggtctctacaaaaaacttttaaaaagtagctgggtgtagtggtgtgtgcctgtagtcccagccacccaggaggctgaggaggctggagggttgcttgagtccagcagtttgaggctgcagcgagcaatgattgtgccactgcactacagcctgggcatgagagtgagaccctgtctctaaatatatgtgtatatataaaagaaaagatcactttgacaacaccacatgctggtgaggatttagaaaaactaggtcacttattgctggtgggaatataatatagtacggccactctggaaaacagtttggcagtttctcataaaactgaatgtacaattagtatacaacccagcaactcctgcaatcctgcgcattaatcctagagaaatgaagccttcatgttcacataaaaacctatactcaagcgtgcatagcagctttacccataatatctaagaactggaatcagctcagatgtccttctgcaggtgaatggttaaactactcagtaataaaaaggaatgatctactgatagcatgcaacagtgtaggtgaagttatgctaatgaaaaaagccaatcccaaaaggttacatattatatgattctatgtatataacgttttggcagtgacacagttttagggatggagaatagattagtggttgcctggggttagagatggggttgtagagtaggttaggggtggcagaggagagaaaagagagggaggcgagtgtggttataaaaggacaacacagggggatacttgtaacagaaatgctttgtctttttttttttttttnnnnnnnnnnnnnnnnnnnnnnnnnnnnnnnnnnnnnnnnnnnnnnnnnnnnnnnnnnnnnnnnnnnnnnnnnnnnnnnnnnnnnnnnnnnnnnnnnnnnnnnnnnnnnnnnnnnnnnnnnnnnnnnnnnnnnnnnnnnnnnnnnnnnnnnnnnnnnnnnnnnnnnnnnnnnnnnnnnnnnnnnnnnnnnnnnnnnnnnnnnnngctcactgcagcctctgcctctggggttcaagcgattcttctgcctcagcctcctgagtagctgggactacaggtgcacgccaccatgcccggctaatttttgtatttttagtagagacagggtttcatcatgttggccaggctggtcttgatctcctcacctcatgatccgcccacctcgcccacctcggcctcccagagtgctgggattacaggcttgagccaccgcgtccggcctattttattttttttgagacagagtctcactctgtatcccagactggagtacagtggcgcgatcttggctcactgcagcctctgcctctggggttcaagcgattctcctgcctcagcctcctgagtagctgggactacaggtgcacgccaccatgcccggctaatttttgtatttttagtagagacggggtttcaccatgttggccagggtggtcttgatctcctcacctcatgatccgcccacctcggcctcccaaagtgctgggattacagggatttttgtgtttttcgtagagacagggtttcattatgatggccaggttggttttgaactcctgacctcctgtgatctgctggcctcgcctcccaaagtgttgggattatagacgttgagccactgcactcggccaaggaaagagatgctttgtcttgagtgtggtggtgtatagaaattgtatagaactaaggctgggcacggtggctcactcctgtaatcccagcattttgggagaacgaggtgggcagatcgtgagttcaggagattgagaccatcctggctaacatggtgaaaccctgtccctgctaaaaataccaaaaattggccgggcgtggtggctcacgcctataatcccagcactttgggaggctgaggcgggtggatcacgaggtcaggagatcgagaccatcctggctaacacagtgaaaccctgtctctactaaaaatacaaaagcaaaattagccgggcgtggtggcgggcgcctgtagtcccagctacttgggaggctgagacaggagaatggcgtgaacctgggaggtggaggttgcagtgagctgagatcgcgccactgcactccagcctgggcaacagagtgagactctgtctcaaaaaaaaaaaaaaaaaagaaattgtatagaactaaatacacaaatgaacaacaataaaacttgaaactctaagtaagatcactggattgtatcagtgtcaatattctggttgtgataatgtagtatattaaatagttttgcaaagtgttaccattggggaaaactggataaagggcacactggatctctgttatttcttacaactgcacgtgaaccaataattatcttaaaaaaacttcaattcaaaaaagtctgccctgatccagttgggaggctactgaagtaatcaaagctagacatgctggtgtcttgtgactggtagcagtggtgatggtaagtggtcagattctggatctcttggagaaagatctgacaagatttgcagattctttaaaaaaaatgagattaggctgggcacggtggctcacgcttgggaggctgaggagggcggatcnnnnnnnnnnnnnnnnnnnnnnnnnnnnnnnnnnnnnnnnnnnnnnnnnnnnnnnnnnnnnnnnnnnnnnnnnnnnnnnnnnnnnnnnnnnnnnnnnnnnnnnnnnnnnnnnnnnnnnnnnnnnnnnnnnnnnnnnnnnnnnnnnnnnnnnnnnnnnnnnnnnnnnnnnnnnnnnnnnnnnnnnnnnnnnnnnnnnnnnnnnnnnnnnnnnnnnnnnnnnnnnnnnnnnnnnnnnnnnnnnnnnnnnnnnnnnnnnnnnnnnnnnnnnnnnnnnnnnnnnnnnnnnnnnnnnnnnnnnnnnnnnnnnnnnnnnnnnnnnnnnnnnnnnnnnnnnnnnnnnnnnnnnnnnnnnnnnnnnnnnnnnnnnnnnnnnnnnnnnnnnnnnnnnnnnnnnnnnnnnnnnnnttgataatttataaaatgtgattatagaatgctgtagtgtccttgagtttacatgcccttccttacacttgtgtgcctgtgcagatgccttgatttcacaattagaggaggctgactgagatttgtttaattttttttttttttgaggcagagtcttgttatgtcccccaggctagagtacagtagcgcaatcttggtgcactgcaacatccgcctcctgggttcaagcaattcttctgcctcagcctcccgagtgcctgggataacaggtgccagcccccacgcccagctattttttgtatttttagtagagacgggatttcaccatgttgactgggctggtctcaaactcctgacctcagatatctgccgccccagcctcccaaagtgctgggattacaggcgtagccacacctggccgtttgttttaatttttaaggtgacgttaaagtgactgcatttaccaaaagtggttgagaagccaggactgttcttatcctgtttttccagttcttgctcagagcaaggtggtttatttttcacttaattaccatacttacttttcatgtagaacaagtcagtttgagttatcagttcatcatctaactaaattccatgggggaaggaatagttttagtttcttaaacttccaaggttgcttattggacaaaatgagatagcaaggcggtgtttttaagttagattttttatttctttggtaatataattttctcaaaaacttagtagtcttttagtttagttgtttttagttggtcctatgttttgcatcccccctctctacttttattttgatagtgccaattgcgaagacatctgaagccataggtttgggtgggaaggcggcacctttagcctgattatctttgccaggctgtttatctccttttgcttggctgagaagtcttaataggaggcttattcccagctacttggggacatagaagcggttagctattgttcatgttttactgaggtctgtgtggtatgttgactgcagtcagttactggttttgagaattgaaggcagcctggtatatagagtaggtattatattgtgtttctttgaattgaatttcctatctcttgtaatctttgccatcatcttctgtgaaagaaaaaaagtttctatcaaactataccattggttgtaagatgcagttcggctttagtgatgctaacacatgatccaaacgtgaaactgagtattggtgaaatacagaggagatttaaagccagaagacctgggtttaaatgctggctctatgacttcaaatctgtgtgttcttgggcacgtcatggttggcacttcaatttcttctctctgtaatgggggaaatgaggccagtcatggtggctcatacctatgatcccagcactttgggggccaagatgggaagatcgcttgaggccaggaggttgagcaattgggcaacatagtgaggccccgtctctacaaaacatttaaaaaaaattagccaggcccagtggtgcatgcctgtggtccccaccactcaggaggctgagatgggaggatcctttcagcccaggagtttaaggctaaagtgagccatgattgtgctactgtactctagcctgggcagtagagcaagatcctgactctaaaaaaaagtaaaatgaaataaaatgggggaaatgaactgctttagtaacatcatctgttttttctgtgagcagtgtagcttgaaagccattggtgaactcatgcactgtgcttccctgtccagatccccattctgcccccagcatggagtataacagtttattagtagtagtcgagaaaccctcattgaatgaatgaatgagatgtagaagtaagtggagtgggtaattgaacacatattcatttccttttcttttttcttatttttagaaagaaagaactttcagctaccaagaaagaccgtgtgaatcattgtctgacaatatgtgaaaacatagtggcacagtctgtcaggtaattgcactttgaactgtctagagaaaataagaactttgtatattttcagtcttaatgggctagaatattctgtgtcccagttattttaaatggattcaaaaatccttgaagaaggacccttttcccatatttctggctatatacaaggatatccagacactaaaatgaataatgttcccttttcgtaatcttttatgcaaaaattaaaaccattatggtaattgaacaacatgtttatgtttagttaacacccttagcaactatagttattttaaaatcctgtgtggtttgatatttttgcgtttattgtaacagtgggaacagcacaaggcggtccactttgtctctctcattttgcagtttgctgtcctgttgtgctggtgctcctagcagtggctggagcccacttctctgtgctttgggattagtggggtcatggggcattgactggaggtcagctttccttgcttgatctttctcactggggtgaactagcagcaccttcttttgtagctgctttgcttttggctatctttctgaccgttgttcctagcagctgtagatggtaaatatgtttaggcctgtttccaatggctgagtaggagacatatgcacctatgatatctgaattctgttacccagatgggcgtgtgtgaaatagttaccttgctttactttcccttggaataaataattcatgttattctcctggtagaagctagaaaaagctctttatagtcagtcagaaaaaaatttttagacaaataatcttgattttagtactgacaaaaatgtgtggtgattcttttttttagttttttttgagatggagtttcactcttgttgcccaggctggagtgcaatggtgcgatctcggctcactgcaacctccgcctcctgggttcaagcgattctcctgccttagtctcctgagtagctggggttacaggcatgtgccaccacgcccagctaattttgtatttttagtagagacagggtttctccatgttggtcaggctgatctcaaactcccaacctcaggtgatccgcccgcctcagcctctcaaagtgctgggattacaggcgtgagccatggcacctggtgattcatttgtttttttaaaaatttcctcttggccattgcttttcactgttttcttttnnnnnnnnnnnnnnnnnnnnnnnnnnnnnnnnnnnnnnnnnnnnnnnnnnnnnnnnnnnnnnnnnnnnnnnnnnnnnnnnnnnnnnnnnnnnnnnnnnnnnnnnnnnnnnnnnnnnnnnnnnnnnnnnnnnnnnnnnnnnnnnnnnnnnnnnnnnnnnnnnnnnnnnnnnnnnnnnnnnnnnnnnnnnnnnnnnnnnnntgtagaaatattgtgggaagaaaatgaaataacaaatgagcatgtgtcctgaaaataaaaatataaaaattctaagttagcatgctattgtagaatacaacactatgataaaagtagggaaaaaaaagtttgaattccacgtctgctgcctgtgtaagctgggtgactttagataagctttaacgtgtttgagccttactggctcatgtttgaagtgtaatccctcgttacacagttcttgtgggatcagacgatgcatgtgaaacactgtgaagaagtaactgcgatagatgtgttcattagccgcctgaacgggaagcacatcccattgcgatgcccatcatccaaagctatatgttatctttactttttttgtttttttgagacagagtctcactctgtcgcccagactggagtgcagtggcgccatctcggctcactgcagtttctgcctcctgggttcacgccattctcctgcctcagcctcccaagtagctgggactacaggtgcccgccaccacacctggccaaatttttgtatttttagtagagacagggtttcactgtgttagccaggatggtctcgatctcctgacctcgtgatccgcccacctcagcctctcaaagtgctgggattacaggcgtgagacactgtgcccagccatcttcacttttcttgtgaaatgatgactctaaatgtttggcaaacatttggtgattgttcatctgatttccactatccaggtctcagagaatataatttatctctgaaagcttattgacccaggaaacaagatctcttccaatctgagtacatcaggctttattcttgtcattttgtcttttgagaattttcaaatggaattcatggaatgttggctcatattcacatattagtaaagtacgctgagacatcttaagattgatttgtggttctatttgccatattaaatcaaaataataactgttaatggttttctttttttttttttttttttttgagacggagtcttgctctgtcgcccaggccggagtgcagtggcccgatctcagctcactgcaagctccgcctcccgggtttatgccattctcctccctcagcctcccgagtagctgggactacaggcgcccgctacctcgcccagctagtttttttgtattttttttagtagagacggggtttcgcccgtgttagccaggatggtctcgatctcctgagctcgtgatccgcccgtctcggcctcccaaagtgctgggattgagccaccgcgcccggcctgttaatggttttcacattagtctgtctcttgtttttatggagtaatgctgagagttcattatgcttcttgttctacagaagagcatgttaaaaggattttttgggatcagagaggttatccatggtttcataggatactctgtactttgcagggatttcagggtatatagccaaaggtgatattttatataaatatgttttatggaaacttactgannnnnnnnnnnnnnnnnnnnnnnnnnnnnnnnnnnnnnnnnnnnnnnnnnnnnnnnnnnnnnnnnnnnnnnnnnnnnnnnnnnnnnnnnnnnnnnnnnnnnnnnnnnnnnnnnnnnnnnnnnnnnnnnnnnnnnnnnnnnnnnnnnnnnnnnnnnnnnnnnnnnnnnnnnnnnnnnnnnnnnnnnnnnnnnnnnnnnnnnnnnnnnnnnnnnnnnnnnnnnnnnnnnnnnnnnnnnnnnnnnnnnnnnnnnnnnnnnnnnnnnnnnnnnnnnnnnnnnnnnnnnnnnnnnnnnnnnnnnnnnnnnnnnnnnnnnnnnnnnnnnnnnnnnnnnnnnnnnnnnnnnnnnnnnnnnnnnnnnnnnncctgtagtcccagctactcagaaggctgaggcaggagaatagcgtgaacccgggaggcagagcttgcagtgagccgagatcgccccactgcactccagcctaggtgacagagtgagactctgtctcaaaaaaaaaaaaaaacaaaaaaacaaaaaaaccaaaaccttatgtatattgtgaaaatgtagtctgctttaagctctctaaagaggtctaagttactggttcctaagtatggatgagcatcaaaatcatctggaaaatttgttaaaaatacaataatgaaggtacctcactgtcctttttcccaaacacacttctgcattctgtttgagtaggtagggcctacacatttttcacaagtattctcttgggaatacccaggaatgctcacttgagcaacctcttactaataccatatactttgataaagtggctaggtaaaaataaatatataaaaatccatcaatctcccatatattagcataaatcagctagaaaacagtaatgtttaaagatctagttcacagtagcactgaagtattgaattccaagaaattgataagaaatatgcagaaactttataaaaacttctgttaatgtttctgaaagatataggtgaccactttctagacaggaagattttatatcattaagttgacttttctctaaattaacacagaaatttaaaataatcttgattaaaattctagtagaggtatttttgaacttgttcactgtaagaataaatacataactgcaaagaatatcttaaaatcatcactaggcccggtgtggtggcccacgcctgtaatcccagcacttttggaggccaaggcaagcggatcacctgaggtcaggagtttgagcccagcctgaccaatgtggtgaaaccctgtctctactaaaaatacaaaaattagctgggtgtggtggtgcatgcctgtagtcccagctacttgggaggctgaggcaggagaatcgcttgaatccaggaggtggaggttgtggtaagcctagatggcaccactgcaccactgcctgggtgacgagcaaaattgtgtctcaaaaaaaaaaaaaaaaaagaaaaaaagaaaaagaaatcaacgctaatatggtgagacttgatatatgtgacattaaaatagtgattggacattagaacaggtatagaacagaaagaagagtgtgtgtatctgtgtggatttatgatgggtgtagcatattgtattagtagggaaatgagggaaatgatatatttctttgactttgggacaacattatatctctacctcatattgcaaacaagcataaaattctgattaattacctaaatgtgaaaaaatgaaatactttcttcaaaaaatgtaatcttagtttgaggaagactaacattatgaaggaaaaacctgttttgactggaatatagttcaatatgtcaaaatccaccttcaacaaaattgaaagtaaattgaacttggggaaagtattgatagcatgtagatcaaaggttactagcctgtgtaaagagcaattataaatcattaagaaaagactgtcaacccgtcggcaccttgttctccgactcccagcctccagaactgtgacgagtaagtgcctgttgtttaaaacacctagtctatatgtactattttgttatagcaactcaagctgattaggaccctagtaatcagtagactgagactaaaacaaaaataagaaccttttttacctgtcaagttggcaaacattaagaatatgcagatttttgtcagaggtgatacaacctttaagaaggcaatttgggaaaacataaagctttagattattaatgtgtctgatctagggcacttaccctaggaaagtgtgtaatgatattggtgcactgctgttcatcccattagaaaataaaaataaccttaatagcttaccactaaaagggggattgaaaaattaagatacatttatttatttatttattgagacagagtcttgcactgttgcctgggccggaatgcaatggtgcgatctcagctcactgctacctccgcctcctgggttcacatgattctcctgcctcagcctcccgagtagctgggaatacaggctcacacctccacacccagctaattttttgtatttttagtagagatggggtttcactgtgttgaccagactggtctcgaactcctgaccttgtgatccatccccctcggcctcccaaagtgtcaggattagaggcgtgagccattgtacctggccagatacatttatacaagagagtgttagttaacattcatagattttttttttcttgtttactttttattaaaaaaatttttttttagagacagggtcttactctgtcacccaggctgaatgcagttgcacaatcgtagcccactgcagcctgaactcctgggcggaagtgatccttctgcctcagccttttgagtacctgggggactttaggcagtgctgctatatatacctggctaagttttaaatgttttatagatgggatcttgctatgttgcccaggctggtctagaattcctgggcccaagcaatcctcccaccttggcctcccaaagcactgagattacaggcattgagccaccacttctgatcaatagatatttatatttgtgactggaaaatatattaacaatgtgttaaaaaattcagttaaaaaataatgaaagatttttgcttctagctaagatagaataacaaggacagcatttatcttcttgccttgaaatagttgaaaatggataaaatatatgtaacagtggttttcaagttattgggcattaggcaaagaagagtagttatcacaggaaaattaatgtggagagccctacaatttccttacattgctgcctggccatggcaagaggaaaaactgaaaggaaactgaggctgagccagtggtttgctgggttgaggaggcagagctgggagtccagagatgcaaggtggctagagcccgtatggaaaaataccagggaagagagctgcagagggagctccggagaactgcacagtaccctctcatgtgtgtagctgagtattgatgagcacatgctggtgaggaaatgacccagggctgcaggtagaaccacttaaaaggattagaaggaacaattgctgcaactcacacagggccaggaagaatttctttttttttttttttttttttgtatttttagtagagatggggtttcaccatgttagccaggatggtctcgatctcctgacctcgtgatccgcccgtctcggcctcccaaagtgctgggattacaggcttgagccaccgcgcccggccaaagggccaggaagaatttctaatcacacaagtcggagtggaaaacctcggctctcatagagcagcaggtagagtactcagaagggtttgcctgcctagccccagactaagtttcgttactctgaccccgcctaatattaaaaaaagattaattaaattaattgtttgcaacaaaagtaatatatttcagtgtttataacgtgtagaagtgaattgtatgacaatagcataaaggctggaagagcagaaattgacatgtatttgtgctggacagaataatgttcccctcttttcccaaaagatatcgagtcctaatccctggaacctgtaaatgttactttataaggaaaatggtttcatggtgtgattaaattcaggatcttgagatgagggggctgtcttggatgatttgggtaggcactaaatgcaatcacatgtgtatgcaaaggaggcagagggagattttacatacacagagaaggccatgtgaagatagaacagaaagatttgaaggtgctggccttgaaaattggagtgatgaagctataagccaaggaatgcagtagccaccaaagctggaagaggtaggagcaattctccttcagagcctactccagagggaacgtggtgctgccagttccttaatttcagctcagtgatactaattttggactctggtctctgaaactgtgaaagaataaattttttttgtttgtttgtttaagccacacagtttgtggtaatttgttacagcagctgcaggaaactaatttatgctgcatgtgaaatggcataatatcattaagatagattgtgataaaggtacatagtataaacaattaagcaacaactaaaagcacaacaaggagttatagctaatgaaccaaaaaaggagattagaatcataaaaatagtgaatcccaaagaagccagaaataggggaagaggcaaataaaggaaagaaagagcttgatggtagatttaaacctagttatgtcaaaaaggacattaaatgtaaaagatatttttcggattgaatggaaaagtaagacccagtatatgctgctgcctgcaagaaacatattctaaatgtaaaggcaaaaatagcctacaagtaacagaacagaaagaagttcaccgtgcttacaagaattagatgcaagctagactggttctgttaatatcagacaaagtggatttcagagcaaaggctattgcctaggatgagatggtcgtttcataataacgaaggggattcgttcatcagccgcacataacaaactgaaatatttatgcacctgactacggagctaaaatacacgaagcaaagcctaacaactacgagtagacacaggcaaatccacagtgagagagatttcagtggcttctctcagtgatttgtagaacacgtagccataatatctggatctagaacagttgaacaacactgtccctatgcaacctgattggcttttacaggacactccacccggcaccagcagaagagacactctctcaagtgctcacagaatgtctgccaagatagagcagatgctgggccataaaacaagtctctaaattaaacgcattcaaattattcagagtacgttttccgacctcagtatcattaagttggaatatattataggaagataacctggaaaagcctcagatatgtggaaaaactcatttctaagtggcccatgggtcagaagtgaagtcaaaagggaaaactgaaaatcttttggattgactgatatgaaaacaatagatgtctatacttgtggggtgctgttacagtatagtaaagggaaatttctagcattaaatgcctgttttagtaaagaaagatttcaaatcaatgacctcagcttctaccttgggaaacttgaaaatgacaagcaaatggaatccagagttaccagaaaggccaggtacagtggctcatgcctgcaattctgccactttgggaggccaaggcaggcggattgtttgagactggcagttcaagaccagcctgggcagcatagggagactccatatctacaaaaaacacagaaaattagccaggtgtggtggcatgtgcctgtagtcccagctaaccaggagtctaaggtgggaggattgcttgagcctgggaggttgaggctgcagtgaactgtgattgtgccactgcgctccaccctgggcaacagaatgagaccctgtctcaaaaacaaaaacagttactagaagaatggacatcatagagataagagcagaagtcagtaaaatagaaaacaaaaatacatagaaaatcaataaaaccaaaagctagttcatcaagaacatcaataaattggtgagactaataggaaaaaaagtgaagtcacatattatcaatatcaggaatgagggagatgacagtagtatagattatatagatattaaaagggctatatgaggcaggtgcggtggctcacgcctgtaatcccagcactttggaaggccgaggtggacagatcacctgaggtcaggagtttgagaccagcctgcccaacatggtgaaactccgtctctactaaaaatacaaaaattagctggtcatggtgccatgcgcctgtagtcccagctactcgggaggctgaggcaggagaattgcttgaacctgagaggcagaggttgcagtgagctgagatggcgccattgtgctccagcctgggtgacagagtgagactccgtctcaaaaaataataataataaaaaggactatatgggaatattatgaacaactttatgccaataaatttgataacttatagattaaatggataagttccttgaaagacacacaaactattaaagctctctcaagaagaaatagataaactgattagccctatatctattttattaaatttaaatgtaaaaatcaatatttagttactggaaaacttttaagtgtggttggaaatggtatatgaactttttcaactgaattttatgaaggctaatcacaggtaaaggttttctgatgaaaatttagtgtctgaattgagatgtgctgtaaaaaatgttgttatgtatcttaatcatttcttcacattaattacatgttgaaataatactttgggtgtattgggttaaatgaaatattatgaaaatcttgcctgttttctttttacttttgatgtgtcacctgggaaataaaaaagtgtgacttacattctgtttctgttgacagtactgctttggagtgcagtgttggaatgatctagcatttcgaagacctttcctcccttcgttattcagggctgtattccacatagataagtctgaaatactgctaagtggcacgttttgttttgtgcttttgtaagtttgttgatcgttactgatgtggacctttggtgcctcttaggctcatggctatcttccaaccattgtttgcaatttttacctagagataaagagaaaaagagatttggtttcagagtaagttagattgagatcatgaaagagcaatctcattttgatgcttcaaaaatagcacatcccccgtattactgggatttgctattcttgggcttacttcaagaacatccttgtgttgctggtttggatgcttccgaatgctgtgaagtcagtttcatggacgtggctcatcagtttagctctcttggctttgtttaggcagttggagcatgatagcctgaacagcttctctcaattaaacatttacaaatcgtttacgaatagtaaacaaactccaggttttgtgactctttgatagttcatctagcacaacaaaaacacaatgtgaccatgatcacctggcatcttagggtgaaatactttggcccagactgaaagcaaaattaaaaaggggcaagagagatatactgctgaactgattttcaaggttccaagaatatcataggttaagagtaaaagtaaacttttgacagagagcagcgggttttctgggattgaagtatctgaagttttcaaacgaaaatttaaaaagaaaaaatgagaattgccttataagtacaatctcttcttttttaaaaaataaactttattttggaatagttttaggtttatcgaaaaaaattagggtagagagttttcatataccctacatccggttaccccagttattatcttaattaagtgtgagacattttcatgtttaatgaatcagtatcgatatgctgttaactaaagtgcagactttattaagattttcttaatttctatgtaatgtcctttttctgttccagaattccgtgcaggacaccggatacctcattacatttcattgtcatgtcaccttaggctcctcttgacagtttctcttcttttttgcttagaaattctccagaatttcagaaacttctgggcatcgctatggaactttttctgctgtgcagtgatgacgcagagtcggatgtcagaatggtggctgatgaatgcctcaacaaagttatcaaagtaagagccgtgtggatggtgttctcagaaatgtcattgttgtaggctaagagaagcagccatcgttgagtgttcttctgtttggagcccctgaggatgtctgcacttttttcctttctggtgtgtggtttggaggtgctctggtatctgcccgcattgcttgccacacctgcctggtcagaaggaactgtgttgacccttgtgcctgcatggtgcctaggtcaatgaagggaaccaatggtgaccactggatgctcctgggaaaatgtcactacaggtaccagagaagccagagctatgcccacatttttttttttttttttttgagacggagtctcactctgtcgcccaggctggagtgcagtggcgcgatctcagctcactgcaagctccgcctcctgggttcacgccattctcctgcctcagcctcccgagcaggtgggactacaggcacctgccaccgcgcccggttaattttttgtatttttagtagagacagggtttcactatggtctcgatctcctgacctcgtgatccgcccgcctcagcctcccaaagtgctgggattacaggcgtgagccaccgcgcccggcgctatgcccacatttctatgagtctcagttttcttaactataaaatgggatcaaagtttttgtggcatgcgtatgagtgtgtgtctgtgtgaggattaaatgcactaattgccactaccggatcctcaaagtggtaagaagtattcttattaatcatgacatcctcacactcttatgcagcaagattgatgggtgtggcactgcttctctttttccatcacatggattccatgctatccttttgcccagggaatctttcctttgtggccagcactttgttgtttggctcatcacgctttctgtgggcaggacgctggcttctctggagtcttgggattctagctccctctcttgtccctagagtggtcactgtcttctctctctgcttgcaattcttgctttgctcgcatctcactcatgcggtgacctgtatcagtttcaccttgttctccgtgcctgctggtcgttggcaccacttgcctgtggatggcatcccatagcgtatttagggcctgcttccccagttaagcttgcttttccacaggcctgaatatccttgcttgcttctgttattcccactggcaggaccacggcggtcttttttggatgagacagggtcttgctcagtcacccaggctggagtgcagtggctgatcacggctcactgcagccttgagctactgggctcaagctatcatcctggcctggcttcttgagtagctgggactacaggcgtgcaccaccatgcccagctaattttaaaaattatttgtagatatgggatctcgccaggttgcccaggctggtcttgaacacctgggctcaagtaatcctccctccttggtttcacaaagtgccgggatcacaggtgtgagccactgtgcctggcccttgatgtttcagttcttgatatttgatcctcagagtcagaaagtctaaaaagaggactatcccaggttgccttggttcacggcaaatgggacgttaagagggcagagaaaacaatatgaccagaaacgcttctaatattggtcatttaacgtgtaagtattgttcttttttaaacctccttcatctttttctagggattgctggacacagtggcttggtgtgtctgagggctgtaggccatggccctgggttgtggttttaggtctcaggtgctcttcctggttgtctccttgcttctttcccatttcctcttctttgtttccagccatttctcccttttgcttaagtttggtgcagcagggtttggctgctctcagattgctgcttcctcagatgatgcagttgccaggcccagtgggctggcagtgggatcaggatctgactaggtttgctctcactgtggcagaggaggggcaggcgtgggagagcacgtgtgaccccaggccaggtgtagggagcccaggcatggtcacttagccttcaggtcctagactttgtcttctcatgagtgtggctgtgtgtgtatggtgagaaccaggttctacgtagcccaagaaaatgtagagaaatgcactgggtatctgacatagcctggcagcacgcctccctcaagtaggttagtctcaggcggtgaagcatgtatgtccagcaagaacttcatatgtggcataaagtctccgttctgtgcggcactgacaaatcaccaccgtcaggaggctgaagtaatttctgtctagggaggcagggaaggcttcctggagacagtagccaataggtgaaagggtagattggagaccttcttaatcatcaccgcctcttggttcgaggggtgccaggaagctgtggaggctgagaggagggggaacccatcttatgctgccagagagtgggacaccctgagggtcaggtcaaggggttgtaccttgttgggtggagaattaggggctcttgaagacttttgatgtggtcaggggagtgtatcatttaggaagagtgacctggtaaggacgtgggatagaggaggacagaggtgggagggagtctaggtgggagtgagtgggcccagcaggagtgcagggcctcgagccaggatggtggcagggctgtgaggagaggcagccacctgtgtgtctgcggaagcaggggcaagagagaagaggccagcggcgcgccgccatcacccagcaactggcgtagattgtgagagcccattccctgcttttaggaggggccgagttttagttttctcttataaaataaacttggtatttgtttacaaaacatttgtaaagctaaatcaaggtttgataaggcttctagttttatttaagaagtaatgtttaaataaatgtccaattcgctttgcttatttaaggactttcagtacaaacttcaacaacaggatcaggatttaaacatttctgagatgttattacccctcagaatttcccagaacgtgatctggttttgattttcaagcttgctgacccagtaggttaacccacaaattttactaagatacacctcagtccatttatatcgactgcccatgtcacggtcaaagagatcatcgactgatgtttggcacagcttcctccctcttgggtgggcaagcatttggaagagaaggctcccatgggtgagagtggggcaccagagtcttccccgtcctgtcccctggcttgagaaacccttctctaatgtggactttgtgccgttagcatcgttactggcttgaagttgaccatgtggacataatttctggtttagcctcacaagtgagcaaggagggttgagagatgtgctgtgaggaacatggggcccccgctggccgtgggctctgggtcaggggggcaggggaccatgggcatacctgacagtgaggaggggccacacctgcagaaagcatgcgggactcggcnnnnnnnnnnnnnnnnnnnnnnnnnnnnnnnnnnnnnnnnnnnnnnnnnnnnnnnnnnnnnnnnnnnnnnnnnnnnnnnnnnnnnnnnnnnnnnnnnnnnnnnnnnnnnnnnnnnnnnnnnnnnnnnnnnnnnnnnnnnnnnnnnnnnnnnnnnnnnnnnnnnnnnnnnnnnnnnnnnnnnnnnnnnnnnnnnnnnnnnnnnnnnnnnnnnnnnnnnnnnnnnnnnnnnnnnnnnnnnnnnnnnnnnnnnnnnnnnnnnnnnnnnnnnnnnnnnnnnnnnnnnnnnnnnnnnnnnnnnnnnnnnnnnnnnnnnnnnnnnnnnnnnnnnnnnnnnnnnnnnnnnnnnnnnnnnnnnnnnnnnnnnnnnnnnnnnnnnnnnnnnnnnnnnnnnnnnnnnnnnnnnnnnnnnnnnnnnnnnnnnnnnnnnnnnnnnnnnnnnnnnnnnnnnnnnnnnnnnnnnnnnnnnnnnnnnnnnnnnnnnnnnnnnnnnnnnnnnnnnnnnnnnnnnnnnnnnnnnnnnnnnnnnnnnnnnnnnnnnnnnnnnnnnnnnnnnnnnnnnnnnnnnnnnnnnnnnnnnnnnnnnnnnnnnnnnnnnnnnnnnnnnnnnnnnnnnnnnnnnnnnnnnnnnnnnnnnnnnnnnnnnnnnnnnnnnnnnnnnnnnnnnnnnnnnnnnnnnnnnnnnnnnnnnnnnnnnnnnnnnnnnnnnnnnnnnnnnnnnnnnnnnnnnnnnnnnnnnnnnnnnnnnnnnnnnnnnnnnnnnnnnnnnnnnnnnnnnnnnnnnnnnnnnnnnnnnnnnnnnnnnnnnnnnnnnnnnnnnnnnnnnnnnnnnnnnnnnnnnnnnnnnnnnnnnnnnnnnnnnnnnnnnnnnnnnnnnnnnnnnnnnnnnnnnnnnnnnnnnnnnnnnnnnnnnnnnnnnnnnnnnnnnnnnnnnnnnnnnnnnnnnnnnnnnnnnnnnnnnnnnnnnnnnnnnnnnnnnnnnnnnnnnnnnnnnnnnnnnnnnnnnnnnnnnnnnnnnnnnnnnnnnnnnnnnnnnnnnnnnnnnnnnnnnnnnnnnnnnnnnnnnnnnnnnnnnnnnnnnnnnnnnnnnnnnnnnnnnnnnnnnnnnnnnnnnnnnnnnnnnnnnnnnnnnnnnnnnnnnnnnnnnnnnnnnnnnnnnnnnnnnnnnnnnnnnnnnnnnnnnnnnnnnnnnnnnnnnnnnnnnnnnnnnnnnnnnnnnnnnnnnnnnnnnnnnnnnnnnnnnnnnnnnnnnnnnnnnnnnnnnnnnnnnnnnnnnnnnnnnnnnnnnnnnnnnnnnnnnnnnnnnnnnnnnnnnnnnnnnnnnnnnnnnnnnnnnnnnnnnnnnnnnnnnnnnnnnnnnnnnnnnnnnnnnnnnnnnnnnnnnnnnnnnnnnnnnnnnnnnnnnnnnnnnnnnnnnnnnnnnnnnnnnnnnnnnnnnnnnnnnnnnnnnnnnnnnnnnnnnnnnnnnnnnnnnnnnnnnnnnnnnnnnnnnnnnnnnnnnnnnnnnnnnnnnnnnnnnnggtgggagaatcacttgaacctgggcggtggaggttgccttgagccgtgatcacgccactgcactccagcctgggcaacaaagtgagacttcgtctcaaaaaataaaaataaaaatgaaataaaatcagtccgggtgtggtggctcgtacctgtagccccagcacttcaggaagctgaggcaggtggattgcttgagaccaggagtttgagaccagcataggcaccatggcaaaacgctgtctgtacagaaatgagctaggtgcggtggtgcacaactatagtcccagttacttgcgaggtggaggtgggaggataaatggagcctggaaggttgaatctacagtgagctgagattgtaccactgcccttcagcctgggcgagcaagtaagaccctgtctcaaaaaaaaaaattattgactatatcttattgtctataatccctcctctgtgctattgaataccaggttttgggcccttatttccatcactgaacaaacttcactctattgagcagcatgtgtggaatttcatctttattcaataattaacagctaggaggaaatgctgtttgctagactattgctttacttttcttcaaaaggttactctttattagatgagatgggaattaaaaatggtaacttactttatgtctttataattgaagcccgctagatcttaaagtagttaccagatgttttatgcatttaaatggccttttctctaaaaatagaaagtaacaatgaaagaaaatgcttcgtttctatgcaaccctcttggtgactagtgtgtgtgactcttaatgtgacactcattgcaccccctcagaatggtgcccctcggagtttgcgtgctgccctgtggaggtttgccgagctggctcacctggttcggcctcagaaatgcaggtaagttgtacattctggatgttgatttttgttgggggccagctgctactgatcctttatgtctcagctcagatgtcatttcagaaatctgctctgccccttccaaattgcagtcgaccttgccctgtttatgtttccgtcatagcactaatccgtgtcagaaagtgtcacgtacagtctgtgtgcttgttcattttctatcccaccctcccccaagagacttatgggatgtgtgccccaggacagcaggggtcttactgtcttatgctctgttgcagcctaaacagcagtaacagtgtctgcacatagtacttgcttaaatgattcttgccaaattgttgaaggttgaggtaccagtttcattattgctgactataggagttacagcaaaatatccatttgtctattacatgagttaaaaatatggttgtttcactatgaatagttttgtctagtcaaaacagttgtgtcttaacggattgagaaacaaaagcaggaccacttttcatcagctccctcctccttaacctgcagtatacgctgatgctgatgtcctgtagaccctcagctccatcctgagtcactgggaacgtggtctaaaccctcattattagtatgaactgagtttcaataagaatctcacatgggtcgggtgtagtggctgatacctgtaaccccagcacttcaggaggccaaggcaggtgaatggcttgatccagactaggcaatatggtgaaaccccgcctctacaaaaaatacaaaaattagctgggcatggtggtgcgtgcctgtaatcacagctactggagaggctgaggtgggaggatcagttgagcctgggaggtggaggtcgtgttgagccaagatcacatcactgcactccagcctgggcaacagagtgagacctgtctcaaaaaaacaaaaaacaaagaaacaaaaaaaagcttatatgggtgcagaggtataatcactaaggaaatttctttttgtgtagtcttttttcttttactgtcatttcaaaaaatgtgttatatttctgaagtaacacatccaggttctccacatagcagccaaagtgaccttaaagaacataattgggtcttgtcattcccttatttaaactcttgtgcccgtttcccagtgccgtttagattgattccagactggtaactggctccgtcacctcagacactctgcattgactcattagcctgatcagttcttcagatgagtcaggtttttcttcctcctgatggtttgtttgttttgtttattcccctcagttctcagcaaaacagtcatttccttagggaggtttccctagcctccctgtctttccctgtcccaggagcctggtggtgtggtcactgccctctgaggccctgcttgttgccaggctctgccactagagggcagggctgcaccactcctggcacctcacacctggcctgccctgtcagtgtttgttgggtgaattcctgtgatctgtgactcactgctctgtgtcctacacattctgcttttcttctcccctcacaataccatttataattctcctttttcaggaaagctttatttccattaaaacatttttgtttttaaaatggtattttcttacactattattttctaattaaaaatgagtgttttggcagggcgtggtggctcacccctgtaatcctagcactttgggaggcccagatgggcggatcacaaggtcaggagatagagaccatcctggctaacatggtgaaaccccgtctctactaaaaatacaaaaaaaaattaggcgagtgtggtggtgggcgcctgtagtcccagctacgtgggaggctgaagcaggagaatggtgtgaacccgggaggtggagcttgcagtgagccgagatcacgccactgcactccagcctgggcgacagagcgagactccgtctcaaaaaaaaataaaaataaaaaaaaaaaaataaataaaaagtaaaaaaaaaaaagagtattttaagaagtattacgatttactgcaaataatttttaaacccagccttttagatcctctgtgatcataagagaaatgaaggatgtctcccgacacttgagcttcatccacatttcattctctcgttctttcagctgagctttgcccatccccattagggaccgtttggcatatgaaactggcttttccctaacagggaatgaattgcttctatttctcctgaaggagagctggaggaatgacttgcgttcttttgcatacacaggccttacctggtgaaccttctgccgtgcctaagtcgaacaagcaagagacccgaggaatcagtccaggagaccttggctgcagctgttcccaaaattatggcttctttcggcaattttgcaaatgacaatgaaattaaggtacgattattgcctcagatcacaaacatgtgagtgacgctgtgagtgagtctgtggagggttacggcttctgagcagggagtcatgtgggagcgcttcttagagtatgttgtatgtcgtaatttagactaccgtcatttgtgttatttttgaggcacctaaagacttctttccacttctgatttcttactgtggggtgaagagttgaattgggagatggtttatagatgcacattcaaaaggcatatttccagagcagattggttttcagtgtattagagtgactgtttaacctagctgtggaaagatggctgtgccaggactgcaggtaggagaaagctcactgacgaggccttgtgggtctgaacatcctgcagctatcagggcctgttggctccctgttgtgcattccaacaaaccaccttcaaacccactttagtgtttgtttataatgtccagaaatagtgaccctgtcacatgctctacagattacaggattcctagcctcttcctttttggtgggtcagtcctgggtttgagcccaagtggccctcttggaaggtgatgatacacagtgggtagagtggaatcagatggacttggattagaattctgtccgctttactggttcttttcctctaggcaaactatccaacagctctaagctatttccttcgtattctgaaaactaagccttaatgggacccatatcgggcaattctgagagtgaaataaatgaatatgtgttagcgtgtagcatagtcgcccacaggaagggcttagatgttagctgctactgctcttattagctgaatgacttggaataaagtgttagcctctctcatgtttttttctctgagctttgaagttttcttgttaatactaaggagatattcaaactagtcatggggttttggaatgacgaagggagatcatgaatctaaagaatttagtgtggtaattcatcatgctcagtaaatggtagctgctgcttgctgttatttttattaccatctctttggagtgggagtaggtctcctttgtggtcagaggctgtgagagctccgcagcgccagtctgcccgtcagtacaccgggctctgatgaaggcagttccctctgtggtatctctggctgtcagagctcagatgatagatggtgtttttgtactctcagttctcatcattttcatgatttcgatcactatttgagtatgatgatgctaacactttgttgaacatagagtccattaattacttccttcctgaaccttaggtatttaaaaaaatctattctgctacctctctgctcatttatgattattcagatttattatcaagagcctggtacagtggcttgtgcctataattgtagctacatgggaagctgaggtaggaggattgctggaggccaggagtttgagaccagcctgggtaacatggtgagaccctatcgctaaaaaatgaaaaaagttagctgggcatgatggcacgtgcctgtggtcctagctactcaggagactgaggcaggaggattgcttgagcccaggagttggagttcgaggctatactgagctgtgattgtgccaccacactctgggatgggtggcaaaagaagatgccatttcttcaaaacaaaacaaaacaaaaaaaggtattatcggtgaaattcaatagtaccaacaggattataaacaaagatagttctcttcctactttttctcttaatccttgtgtctcagaggcaaacataactcttagtgtttcttccaatatttacttcgannnnnnnnnnnnnnnnnnnnnnnnnnnnnnnnnnnnnnnnnnnnnnnnnnnnnnnnnnnnnnnnnnnnnnnnnnnnnnnnnnnnnnnnnnnnnnnnnnnnnnnnnnnnnnnnnnnnnnnnnnnnnnnnnnnnnnnnnnnnnnnnnnnnnnnnnnnnnnnnnnnnnnnnnnnnnnnnnnnnnnnnnnnnnnnnnnnnnnnnnnnnnnnnnnnnnnnnnnnnnnnnnnnnnnnnnnnnnnnnnnnnnnnnnnnnnnnnnnnnnnnnnnnnnnnnnnnnnnnnnnnnnnnnnnnnnnnnnnnnnnnnnnnnnnnnnnnnnnnnnnnnnnnnnnnnnnnnnnnnnnnnnnnnnnnnnnnnnnnnnnnnnnnnnnnnnnnnnnnnnnnnnnnnnnnnnnnnnnnnnnnnnnnnggagtacaatgacatgatcttggctcaccacaacctccgcctcccgggttcaagcgattctcctgcctcaatctcctgagtagctgggattacaggcacgcaccaccatgctcggctaattttgtatttttagtagagacggggtttctccagattggtcaggctggtctcaaactcctgacctcaggttatccacccacttcagcctcccaaagtgctgggattacaggcatgagccactgcacccggcaacttccacatttctcagtaacatgcttctactgcttttttttttttttttttttcaattttagacattttttactttcacactataattctatcagaattcagtatgtacattattatacctaagtaaatagtcatggttggttgtgtattatatttctttgtatttcttatttgatgagagagctgtgttttttgctgtgggttgaaactgtggagagaggacatggggaggggaaggaagacagatgaagttggtgactgtaccttcctggccatagctgggttctcagcaccctgggatctgctgatcacctgctcgtaggccaagcccctagcgaagttctaggtgacccagtgctggggatgggggggtcacctgcaaggtctagtcatggaggtgggggctacagtgttggcttgtgctggggccagcatccttaggaatgcatcttggaggaggaggagacagccacccacttcttgactggggccttcagcagtgccagcttcttgggcagactggtgctggctttcatcaccacatcgtgttcaatcttcttccagatcctgacttctaggttcacctttccttagaccccggttcctttcagaggctgtcgctctgccttgctctttgctggcttgtgccttgattatatgtctttgtacaactttttgttttcctggagttaatcctcacatctgttttcctagagtgaattgttacctttatatcacttgcttattattctttgacctttttttcttctcacaccttccaacttctttgtaaaatgtgtttagtacaatttttcatgacaggtaatttaccaaatcagtttttccccagtgcagtcatccatcttgagttacccagctcgctgccccagtctgggcggattgctcttcaggtctgttgtacacttgtatcctaggacttctctttgccatcagcctggaatttcctttgcagttctcctgttggatgcccagttcctacatgccatatgtttatctttctatcctctagtagctttgtgagagaagatgaatgggaggtaaattgtttggagttttgcattcataaaaatgccattttttctcgcgtacacttggctgagtatagtgttctggggtagaaatcatttttcctcagaaatgtgaagtctttccccgttgtcttaaagtctccaacataacccaattccttaacccatgaatgtgcttttctctggaagctttccatttttggggaggtgaagtgctaggtacttagtaggccttttattttttatttttatttgttttttgaggcggagtctcactttgtcgccgaggctggagtgcagtggcatgatctcggctcactacaagctctgcctcccaggttcacgccattctcctgcctcagcctccaagtagctgggactacaggcgcacaccaccacgcccggctagttttttttttgtatttttagtggagacggggtttcaccgtgttagccaggatggtctcgatctcctgacctcgtaatccgcctgcctcggcctcccaaagtgctgggattacaggcgtgagccaccgcgcccagccagtaggccttttaatttggaaacttatatacttcagttctgggaaaattttcttacatttctctgataaattcttgccttttattttctgtgttctctccttctgaaattagttagttggatgttggtcctcctgggttgactcacatcttacctttttctttttctggtactttttagatatccatctcaaactcttctattcagtgttatgtttttaacttctttcttttctttgtctcttgatggggtcttgctttgttgcccaggttgaggtgcagtggtgcaatcatagctcactgcagcctccaactcctgggctcaagcaaccgttctgccttagcctcccaagtagttgggactacaggtatgcaccaccatgtccagctattttctttactttctttcttttttttttttttttttgagatggagtgctgctctgttacccaggctggagtgcagtgatgcgattttggctcacttaagcctctgcctcccaggttcaagcaattctcctgcctcagcctcctaagtagctgggattataggtgtgcaccaccacgcccggctaatttttgtatttttagtagagacggggtttcgccatgttggccaggctggtctcaaacacctgacctcaggtgatccacctgcctcagcctcccacagttctgggattacaggcgtgagcccatcattaaatctttaaatactagtatctgtaagtcttttcctcttgagtcagccagtatccctggaaggaaattcctcattttcctgcttggagactataagcttggctgtgtttatcctgcaaccggggactggaaggggatggaaggggactgacactgttgctggtcagggcgccctctttttgttttctgtatgcatctcacatctgtcctcagttatgtaaacacctcttgagattatccctctcagtctttgctggaggtggggaaggggctgcttcctgggctgccttggattggaggggagacctcaggcgagtgggtgggaatttgcccaaggagccatgagacaagccactgttccaccctctccgtccctccactttcagatgtatgtggtgcctccaaagcccgagtgcttcttggagttctgtggcttgaataagcttgcttttcactggtatccctcataccttctcccccatccccagcaaagcttgcatttgaacttcttcccatgggctaacaaatcagtcagttatgtagcccttgttactttttagcttccgaagttttgttgacacacgtagtctgctagtgtccctgttctgttctttctgtccgtgtacatttatgctttatacaacttctttacatgattttcgtggggtttctgggtagcagagcttcacatgttcaatccagcatgttggattagaagtctcccaccctctggtgtattctcattctcagaattacctgccaaacaccgatactcccttgtttttccttttcctgacaggaaatgtacataccagacaggacagaaatcattagtgtatcccttggtgaataaccacaaagtgatcttaccctcgtaaccaccacccaggtcaagacagagtattaccagcactcagaagcctcacccccatcctcccatcactgcttcttccttcctccccaaggtcatgactgtcctggcttctaatgccagagtctgtttttaaattctgtgtacatagaccatatagtatgtattctttttgtctggtttcttttgctcgacagtaatttcttaagagtcttctatattatcgtgtgtattagtagttcctgtagttttaggagcttcatagcattccattgtaggtatataccacagtttattcattgtgttatcactgggttgtttctagttcttggctattgtgagcaatgctactgtgaccactctcaggtgttttttttggagcacatgtgcaggtttccatcatgcgcagctagaggtggagttgttgggtgatagggtgtatgcatgtcagctgcagcagaaactgccaaatagctttcctgagtgcttgtaccagctcaccctttggttgctgcgtatggggactccgggagctctggtcctcgctagcacttggaattgctgatgcttttacttttagccttcctgatgggtattttctggaatcacattatgattttaatttccgttccttaaagtacccttgactctgaagtttaatgattaatgcatctcttcctttttgaagtactctgaaaggtatgttgtgcatgtgttgaaaactggagctatctagtctaaaatacagtgtacctcctccctgtttgaagagttgtagcatggcctcggggcctcctgttaggtgccttggagaagggattcttgggattgtagagattagacctgaggaggccccttggagctctcagactaaattttgttctttattattccaaactatttaagctcaccgtgtgctgactcatcataataatgagtagctctcattgtgcttgtatatttggaccaatagaatgattttttttttttgagacatagtcttgctctgtcacctaggctggagtgcaatggcacaatcttggctcactgcagcctctgcctcccaggttcaagcgattcttgtgcctcagcttctcgagtagctgggactgcaggtgtgtaccaccatgcctggctaatgtttgtatttttagtagaaacggggtttcaccatgttggccaagttggtctcaaactcctgacctcaagtgatctacccgcttaagcctcccaaagtgctgggattacaggcgtgagccgctgcgcttggccaaagtagttttttaagatgtgaatatcttttcttgcagctaaaaaagtttgtcagagataattctactttattctccaggtggtttttcagggagaaattggaggcagtaaaccacggggggagtcctgtggcttggtgggtgggtgggggaggtgtggctggggtggggagaagtcctgtggctcgctgggtttggggggagctgtggctggggtggggagaagtctagtggctggggtggggagaagtcctatggctcggtgggtggtgggggagctgtggctggggtggggagaagtcctgtggctcggtgggtggtgggggagctgtggctggggtggggagaagtcctgtggctcggtgggtggtgggggagctgtggctggggtggggagaagtcctgtggctcggtgggtggtgggggagctgtggctggggtggggagaagtcttgtggctggggtggggggcagtcctgtggctggtgtctcatcatgtgcctaacagtgtccagaggtctcgtgtaaattccctgggagtcgataagcctctgagaaacagatgatgctaaccacgctgtggaagagaaacttgtttataaatcagatgtccgttactggtttactgcttgtttgcccaggcatagctccgacagagtccccgactcatagtgattgctcagtgcgtgctgaacaatgattggaatcaagtcatggctcagagcatagttttgaataatgggaaattgatgttcttaagtaacatagtcaccaagataatgcaactagatgagtcaccccttttcaattttaggatatttttatcaagatttaagtggtcatcattagaattatagcagtttctcctttggattgttctagaggcccagtgagaaagtattccctaatttctcaggagaacagttgtgggtagtgtgctgtcatgtccagttaaattgcagacgtttccggttgaagatattccagtcctgagaactttgtgacattagcaggacttttacaagccatctcttagggtggggcattactgtagttggctggtactcttttctccttaactttgtcatttgttgattttttttttttaactgtccccaaacactgtgggcagacagtatctagaattgaggcctccacccctgcagagaggacgtggatgctgagcagtccccgagtgaagattataaagaagcaaatagagtacacgtgtctgtgaactgttcttgagtctcccaaattcggggtacttctgttcagctataggaaaagcctcaaactgtttatactttgcaagaattggaaacttctaattcaagttaagttttacggaatgcatggtaagcttcataggagcttcatcttttatctgcttggacttttgcttctataggttttgttaaaggccttcatagcgaacctgaagtcaagctcccccactattcggcggacagctgctggatcagcagtgagcatctgccagcactcaagaaggacacagtatttctatagctggctactaaatgtgctcttaggtaaggtggaggcatacaggtggaagggtctccagcatgtattcatgatagacctttgaaataattaaaatcagatgatccctcagcttctagaccaggctatttggcactggttgactgaatgtgaactgcattgggactgctgtgagcacgcatgggtctctgtgaccctgcagatgcagccatgcccagggacacctagctgggcagtgggtgtgggctggtgtgagccctgcctgccacccagggcctggtcctccgtctgtgccggccctgactacggtgagtctgtgaggcttgagactgtgccttgggtccctgtgggttctctgtaggtcagttgacagtttctcctgttgtttgggtaactgtggaaatgaacactggcaagtgctgaagtgagcactggacgcgtgatatggaccctgccaagccagggatatgggtgtgtagccactcccagtgggcctcatggtgtactcgttcacggtcatgtttgtgccatattgatctcttgggatctcttcttttttaacaaattaagcggggaatctccaaacagtgagttggatgttaagatatcttgctgctgcccccacaggcttactggttcctgtcgaggaggagcactccaccctgctgattcttggcgtgctgctcaccctgaggtatttggtgcccttgctgcagcagcaggtcaaggatacaagcctgaaaggcagcttcggagtgacacggaaagaaatggaggtctctccttctgcagagcagcttgtccaggtaggagcacagggtttactctaggcctggcatgtgaacaactgacatttgaagaactgattactttggaagagaagcggcagaaccgagggttagaggtgtggactctggagctgtgctgctcggttccgaccctaggtgctgacctctagctgccttccttctgtatgccattgtcaccgtgagtcagatgcaggtgatgcctcttcaggtgccactctgtttctaaaaccagaggtcacgatatgtgttcatacacccagtaaatactgattgagcacccactgtgtgctcgggtctggggtaggtgctgggggtcctgtggtgaatatttccgctgcagcctctgccctgtggagcctgtggcctggtgcactggtcgaggcagggtggtatgccccctcagggaggtggggacgtggtccttcggggtgtcagaacaaaatgttggaacttctctttccaatgcagagaaaccctgcagtaattctaatgtactgtgattggcagttgacttcagttctttgtagcgtgcttactcaggttattttcactaactgtgtaacagtgcagcctcattttaagcaattgaattttttgaactttacttaaaatattaggtcagggtttttattgtgcttaacatgtgccatttagctaaattttgtaggatataaaattgtaagtgacttaaaatgattcttgcatagaatcatgaattgaagataatgctaataatttaagcactgagttaggtagtgtttgtgaagtgcttagaatgcttcctggcacatgtgaaggccatgtaagtgctgcttattgataaacagctgagcaagagtgaactctaagaaatgaatggggctgagagttctattccacccagctgccctttggttattttacagaataaaagcagagtctcatgggatatgacatttaattatatttccttcacaaaaaacactgctgaatattttgtggagtaaaaagggtgtagccatggcaataatacatttaaaatatagtttatttcatctttaccttacctgttttttttttttaagctagctttatattgagaattgcatacatgcaaaagtatcaagtcatgaccagttacatttcatttataatcctacttctccctttttttttttattatttggaagcaaaccacaatcatcctcttacttcatctataggtatttcagtatctctatagatgaggactcttttttatttttaaaacttaatgatggtcaggcgcagtggctcatgcctgtagtcccagaactttgggaggccaaggcgggcagatcacttgagcctaggagtttgagaccaacctgggaaacatggtgaaaccccatgtctttaaaaaaaaaaaacaaagtcagccaagtgtggtgatgcatgcctgtagtcccagctacttgggaggctgagatgggaggatcacatgagcctggaaggtcgaggctgcagtaagccatgattgtaccactgcactccagcctggttgatggagcaagattctgtctcaagaaaacaaaacgaaactccaaaacaatgtcacaaaacagtgccattgttagacctgaaaatattaaacatttcctacatcaaatacccactaactcattgtcaatttttctctctactcttttggaatcagcatataaataaaattggttgataaggattgtaaatctctttgatcaactggttctcctccatccgaatttttttttccctttagagttcatttattgagaaaccagattatttgtcttctaagttttcctgtggtctgatatactgcttacatctccattgtgtaaattaacacctttttctgttctctgtatttcctgtacatcaataattggaggaaaaacctggtcagatttagtgtatattttatatctgagttcagtatttcgtatataatattttaaggtaagagtatactcttttaaaaagtgttgagactatatgctcaattttttttaacagatgcttttgaaaaggctgcttgatcataaaagtttagagaccattggtctgttgggagaagcaaataattacgaaacagtttagcaaggttaaggtgcacatggtagggcctggagaggttcagtcgtgagccgtcactgatgggcacgtggaatctgacccggcacagagagctgggagaagacaggagctttatagacagaaaacgtggtctttgccaagtcccgggagtgaaagagtgagagaatgctcacagcacatgagtgtgggtgcgtagacagagcaacggtgggtcctgaaaaggcctccaggctttctcatagattagcaagagtgttggttatggaggtcagaaggaggtcgaaactgtgttaaattgggattgcagtaatcctggaaggacagagatagagggtgaaggggaaaaaagggtatggatgtgagacttaattgctgattttcttaatacctttctccaaagtaaataaatgatatggcacatttttgaactagcaaactctagatatgattatctgtataacatatcttactccatcttcttttgactaataactgttcttaattaaattactgtgagatgttcaattcagcaaatgtagtttggctaactatatttaattagaatttaatataatcctaggcctggccaaactattaagcaagtgtgggcaaaatattgataattttagatatgcaggagctcagtttctttctatgtgtgctttttgaaaaagaaagaaattgaaaaatagaggaagccctgaaatccaagaaacaaagtctctcatctaggcatgcaataaaagcaattctaggatgattgttgttcggcatgtagtttgttagaaaacattcttcttgaataaatagtatgcctaagaaagtgggcagagggaaggcatatgcatatattattaacaaggagggagaaaaaggcaattagtaaccatccataggagagccagcaagatttataaaggaaatttgtgatccaagtatgaagcaaaataagatgcataataaattttaagcaagtaatagattacagtaagagaacccatttgaccattaattttggggcattttctttcaaatgacatggagtagtaatgaaatatttctttctttctgagtctaggttattgtgactggactcagaaagaaagatttcattattgcagtgaataacatttttgaacattattcataaattatgcagtgaataacatttatgaacacatgatacataagatacatactgtttatttttaattaagtttttcagctcaacttctcggcagggaacattaaatgtaaatagtgttacctagtagcatgtaaatggaaatctccatagtatgaaagcagtgctgttgctaacagaatttaggaggcgacagatgaggtgaaggaaatgtgggtgccgatttccttattacattgagaggagccaggagattctttgttcaaaatagatggcttaagaagtcaaggtataagctgattacctagagcaggtacccacaaatgttttgtgtaaggggccagatagtaaatattttcagtcttgcaggccattccaagtctgtggcaactaggccccactaccttcgtagcacgaaagcagccacaggcagcccataaacgtggctgtgttccagtgaaactttatgtacaaaagcaggtgcgggccagacctgacctgtgtactgtggtttgatgacctgggattcaggggtataggagttaccatcagaggagctgaaagtgagactttttactttatactcttctacactgtctgattttttaaaaaagaaacatatgtattttataatattgaagatggggttggcaaatagcaaataaaaatacaggatgccagtgaaatttgaacttcagataaattatgagtaattttatgatgtaagtatattccaaatcctgtgggacatacactacaaaattatttgttgtttctttacaatttaaatttaactgggtgcccttgtcttttatctggcaactctaattaaagggaaaaagaataaattcattatgttcatataatgtgatacagcaggggtccccagcccccacgctgcggagcggtattggtccatggcctgttaggaactaggctgcccagcaggaggtgagcagcaggtgagctggcattcccacctgagctccgcctcctgtcagatcagtggcagcatttgattctcatagtgcaaaccctattgtgaacagcacatgtaagggatctagattgtgtgctccttatgagagtctactgcctgatgatctgaggtagaacagtctcatcttgaaaccatcccctggccctgtggaaaaattgtctcccatgaaaccagtctctggtgccagaaaggttggggagcactgtgatatagtattgaaagtgctgataaatgtggctactgcctttaaaatgtctggtagctctttctcagtggcactcataatagtgttttttgatttttaaatgtgtgtcaagctaactctcccctcagtgtatgctggactttattttccctttcctagtcaccagttttgggaaatagagatcttcattctcatgctgcttctctagtggaagtgctccatttatttttaaggaatgaatataacaatgaaaaaatcatgggaattcagaaaacaacatggaaggtaacgatcacattggtagaagtgatagggaaatatttagggggagaaattaaggtgtaaactttgccaacgaagtcctgttaaaaaaaaaaaagtgaagcttaggatgcattttataaactctgaccagaacacctgtgtttctctgtttctaggtttatgaactgacgttacatcatacacagcaccaagaccacaatgttgtgaccggagccctggagctgttgcagcagctcttcagaacgcctccccccgagcttctgcaagccctgaccacagtggggggcattgggcagctcaccgccgctaaggaggagtctggtggccgaagccgtagtgggagtattgtggaacttataggcaagttattagtaaggtctactcttacagttaacttttcagtgatactagttaccctctattgatgatgggcctgccctgtgctaagcagtctgcattgcatcttccttgccaaaacttataatacagatttcatctttattttataaataggggagttgggctgggtgtggtggctcaggcctgaaatttcagcactttggaaggatcacttcagcccaggagtttgagacagcctggccaagtgagaccctgtctctccaaaaaaaaaaaaaaaaacaaaaactgggcatggcggcacgtgcctgtagtcccagctgctttggaggctgaggtggtaggattgcttaagcccaaaaggttgaggctgcagtgagttgtgatggcagctgcactgcagcctggtgaccgagcaagatgctgtctcaacaaaatttaaaaatcaaagaagagaattaaagtttagaaggttaggtggcaaaatgaggccacacatttaaagcccctcctcctgattctttctctaccttgactgcctcctgtggtggttcagttgctgagaaatgaaaacagtagggaaggccgggtgcggtggctcaagcctgtaatcccagcactttgggaggccgagacgggcggatcacgaggtcaggagatcgagaccatcctggctaacaccgtgaaaccccgtctctactaaaaaatacaaaaaactagccgggcgccgtggcgggcgcctgtagtcccagctactcgggaggctgaggcaggagaatggcgtaaacctgggaggcggagcttgcagtgagctgagatccggccactgcactccagccggggcaacagagcgagactccgtctcaaaaaaataaaaacaaaacaaaacaaaaaaaaaaaaaaaaagaaaatccatctgtccccagctctgcatctgcctccactgcccagtctgctcctctccatgcgcttggggctgggccctgtcccaccatgcagtgctgccctggagcagtgagcttagtgggtcctttctggcatgagagctgcctttgggagctggagtgggtgggaatctctgaatcccagcctctaccgctgggtctggtgcctagcaggctatggataagcttttgctgactctagcctcccctaggccactgcagcgtggtcggtgtagtgcactgcgtgtgcagcatggcctttactcacagcctccacattagagagaatctgactgaagtctcgttgctgcctcgtgtgagcataaatgtttgccggaaccatgagcaggaaatattaatctgccttgtttcctgtcctttacactgaagaatctttttctgtatgggatgcatgccttacaaataatgagtggaaatactcatcgctaatgaaaagttatacctgattgttagtctaccaaataatctgagatttctaatacttttaatttggcttttaaaatgcaatttatcttagcttttttgacttcttaggtcatatctttagaactatgtatttgaatgttaatgtaattttcatattgaaattaaaatgttgaactgtgatgttaagtgcttcctgtggaaatacattcacatttgattcaactttgaatcaagctgtttgaagattttcacatttcttctagattttatcagcttgttactttatctgtcactttctgtgatttacagctggagggggttcctcatgcagccctgtcctttcaagaaaacaaaaaggtgattatttcagaaatcagagtcttgtgttgaatcttactgatttccttgtatttctgtaatgtaatgtatcttgtatttcttgtaatactgtattggactctgtgtatgtatatatcttctcagtggagtgattgtatgtgtgaatgttgctggaatctgataacaaggcctgaatagttttatagggtggcttttaacagttactttcatatcagaattgctttgtcatacattttgaatgcatcataaatttctaatgttcggggtcagcagactttttctgtaaagggacagagtgcaaacatcttagctttatgagccatatggtctcttttgcaaccattcagctctgccctgtggcaggaatgcagttgcagacaatacacgagctactggccagccatgttccagtagaactttacttacaggaacaggcaggctgtagtttgcccatacctgccttagggaatgtgttgttatattttatgaagttaacttaccttcccagtgaattttgtttagcattagtcaggaatattattaagtagcttcttttccagcctgggcaatgtcatgagacccggtctctaccaaaacaagaccaaacaaaaaaacagccaggcatggtggcatgtgcctgtagcctcagctgctgttctggaggctgaggcaagaggattgtttgagcccaggagtttgaggtcacagtgagctgtgatcatgccactgcactccagcctgggcaacagaatgagacctcgtgtcgttaaaaaaaacaacaaaaaaagtttcctttgttggactgttttaatttggacctggttatcatttttcagccatatctaactttgtacatatcagaatgttctgataaagcttaacttttattaaagtgtttctgatagttttggtacacattatcatttgcaatgccagttattttcttttccagtggggatttgcataggaaaaaaattgctgtcactttctattttgaaatcttaaaagactgatccttttttgtgtcatgatttgagtgtttaattgagagcctaatgcctaatattatttgcagtattgaatgggatcttaacaggaataacattctagccttcattgaattaagtaaacatttcttgaaagaacttggaatctataatatttgggtcatcacagtatgagatacttaatcaaatttgagattttagtgaaacattgttgaaaagccaaaaagattctaggaaaaattcatctctatattcttgaattaggagagattttcggacctgtgactaagttactctgacacttgtttgtttcttagtcactcttcccagtggcagtgaaaaagaagatgactggttcacattgttgagattagtttatcctcttctggctaggacatgggatatatcctgtctcttttaagcccttttggtattttttcccccatttagagctgtgtcttcaaactgttttgttatagctggaaaatcctttttttaagtgaaatctgcccaaattataagacagatgaaagtagagttgtgttggatataggattagggtgcaagtggcgggggtgtcctggagcctctcttctgagggcagcctagcgcttgtgcctttgaggaaattaccctggggatggtctatggaacatatttgcaaaccactgatttgaaagatagagatggcttttgttaagatctgaattcacctttttggcattttatttgatttctcaagggaaagaacttattttgtaataaagtttccttttatttagtagataggccaagttgctgtgttaatttaacctagagtttgggtttcctttgctaatttttttcacctttaatgtcacatcattgtaaatttgtggaagttatacttctgacttattctttgaagagcagaaattagaaatttccaataattattttgatagtgtcatttaatgacattaatatgtaatgtagccacaaagatttaatgagttcagttaagtcatattaagactgttggtttcatttgttttcattaatgtaattctgaagatgaacaataaaatgtatttttagaactttcaagtgaaatattatttcatccttccagatcatataatgcttgagttctgattgttaatcataaagtcaagaaaattaaaagataataaaatgaaagtgacttttaggtgttagagttttatgtacaaattctggtgtgtcattggagctatcacatgaatatttcaaaggccaatagcattgggtctttacagttaaaacttactatttttaagtttaagtagtactatagattatttaataatcgaaatcaataaatattaattattaaaatgttttgtggtatactttgagaatcattgcttttaactttttccatataggtttattaactttaatagcattctaaacataacatctctacattctttgtgtttaatactgtagaggtataaaaatacttatatatgatgataaaccatattagagtaaattaaatattcttatgagtttcattttagagtgcatttacttaattttgaaatccttatttttagcaaactaaaggaatgttggtacattatttactaggcaaagtgctcttaggagaagaagaagccttggaggatgactctgaatcgagatcggatgtcagcagctctgcctttgcaggtagttctcactagttagccactgatgtggaccttcactctctgccgtccaccccatgcccttcctgcctgtccccctgcacctggtggacagcacaactgggggcagcagtggacccaggttgcttaaatgggggatatttgggcttctttcataatacttactctgaagcttgtgtgtctgtggtgtttgcatcatatatttgctgttttctgtggtttagactgttttaaaattaggtttatgctccttgagcatagggctttgtgagtagggatggcacgttgaaacgtctcatgagttggatgggttatgctgggggttggaaatgggatgaaaaattgtgggatgaaaaattgcctatggatagtttaacttgaaagaatctgcctttgtttacagatagttatcttttttttttttttttgagataaagagtctcactctgtcacccagtgccgatacccaatgtcactggcatggagtggtgtgctcttggcgcactgcagcctccgccttctgggttccagccgttctcctacctcagcctcccaagtagctgggactacaggtgcccgtcaccacggctggctaagttttgtattttttgtagagacgaggttttaccatgttgaccaggctggtcttgaagtcctgacttcaagtgatccgcctgtctcagcctcccacagtgctgggattacaggcgtgagccactgtgcctggccagttacagacagttatctaatgaaattctctgtgtactttataaaagataaggattaacttaaggtactaataactggattatatgagggtggttttggttgtataatcctatctaaaagaatattttagctgtaactgaaagtaagacttaaatatttagggaggaaaatctgaataattctagtagtaattatttacaaaataaaaatagattttatttttgattacacaaattaaacaacaataaaacatcacagcgatctagactagtataaaggtcacacgcttaccaacccaaccgccccaggagtgaccactgccaacagcttcgtgttgacctttttgccatgatttctatatagtcttttttgtttttaaatggtaattaaaaaagtcaactaggaaaatgtgttagaagtttatcttccaggagaataataggactggagtcgagatcttgaacgtggcttggaagaaggcaagcccaccccagagagattacagttgttcgggaccactgcttgcttagaggacctgcgtgtctgggaccgcctagttttgtgcccctgactaggctgccccttaattacgaacgtctttataaattgccctagccagggcttggagtagttggttaagaacttgaacttcagtttttgcagtgaaacaccgtttgagaatattaccttctgataagccttattttattaagatgggtactgtagcgagaggcagtgtgagtggtacatgagggatgcactgctgtcctgcatttcactgtcttcaggatgctatgcagtgatgacatttggaaacatttcatcaaacattccatcaaatggaaacattggatgacagtggaactttgtgttattttgcaagcctttgattccatattgaatgttttctctcgccatttgacaaatgagtgtttctctgtcttcagcctcagtgaaggatgatatcagtggagagctggctacttcttcaggggtttccactccagggtcagcaggtcacgacatcatcacggagcagccacggtcacagcacacgctgcaggcggactcagtggatctggccagctgtgacttgacaagctctgccacggatggggatgaggaggatatcttgagccacagctccagccaggtcagcgccgtcccatctgaccctgccatggacctgaatgatgggacccaggcctcctcgcccatcagcgacagctcccagaccaccaccgaagggcctgattcagctgtcaccccttcagacagttctgaaattgtaagtgtgcggaggggcctgccatcttttattttttatttgagacagagtctcactctatagtgcagtggaggccgggcacagtggctcacgcctgtaatcctagcactttgggaggccgaggtgggcagatcnnnnnnnnnnnnnnnnnnnnnnnnnnnnnnnnnnnnnnnnnnnnnnnnnnnnnnnnnnnnnnnnnnnnnnnnnnnnnnnnnnnnnnnnnnnnnnnnnnnnnnnnnnnnnnnnnnnnnnnnnnnnnnnnnnnnnnnnnnnnnnnnnnnnnnnnnnnnnnnnnnnnnnnnnnnnnnnnnnnnnnnnnnnnnnnnnnnnnnnnnnnnnnnnnnnnnnnnnnnnnnnnnnnnnnnnnnnnnnnnnnnnnnccacccatcttggcctcctaaagtattgggattatatttgtgagctaccatgcccaaccctactgtctgccatcttttgagctcttccctggagacccagacctgaaccctcctgcttgttctcttcttgtctaatacccctaatgacagcgcagcttagatcactagtggagagcttgacctcatctgataccttcactgaagggaacagcttagtgtcttttccactgaacactgaggtaaaaaattggaatagttgattatgtgaactctgctaaaattgagtgcattttacattttttaaggcctttttaggccctggttaaataattatttttaaaaatcctgaaggagcctattataaacagatctgtggtcttaatgaaatgtgattaatactgtgcattattttaagaacttttgacttttcaaaaaacttttacaacatttcccattttatagcagcataggtgtaagtacctctcatccctgagttagtggacaagaaaccctcatggatagtctaataacgtttggtacaagtctatgttgttttatactccattttattttcagttttaaaaactggttaaatatgtgtaacataaaatctaccttcttaaccattttttacgtatgcagcttgctggaataaataattaaataatgtcatggaatcatcgctccacccatctgtgtaaccttttgatcatgtgacactgaagctctgttcccattgaactctctattcctccttccccgccaagtccctggcaaccaccattcttctttctgtcttctgaatttgactactttaggttctcatatactttagggtcacaccgtatttgttttagttagcataacgtccgcaaagctcatgcatattgtagcctgtgttgaacttcctaatgtttcaggccaaatgctattccattgtatggataggccacattttgcttttccatttctctgtccatggacacttgtattgctttcatgctttagctattgtgaatcgtgctgttatgaacatgcgtgtacaaatgtctcctggagactctgctttccatttttttggctaaatacccagaattggagttgcttttacattctgattttaatttaaaacatttatatcattgagtgttttacttaatagtataatagttagcaaactaatattttggtaataatttgctggtagttttagagtccattgctcagtttttttaggtaaattacacaggacatttcaagtggacgtggaacaacttgtgatatggaatcatgccccaagctgatggctaaacatacgaaataccatgccctaaatttagtagatttagtctttgcaatttaggagataacctgttatattgttaggtttttgtctaaaagctttgtcctcatatttccaacttgctgtaaaatttgttcgtgaagacaaatatttttgtatgggttttttcttttttatattaaaaagaaatgtccacattggaatttttttggagtttttagagctaatagagcttttcataatgtagtgggaatgagtgatcagtaagctcttagcagtttccatgcacacatttctgtgcattgaaataaatgacagatgagtacatttgtgttctgtgtgtaaaacgtgctctttcttcgttgcatttccatgttggagggcttgtctcttggtgatcacacttcaaaattctcacagccccccttgaaccgtttaggtgttagacggtaccgacaaccagtatttgggcctgcagattggacagccccaggatgaagatgaggaagccacaggtgttcttcctgacaaagcctcggaggccttcaggaactcttccatgggtatgtggaccacaggtgacgcgctacaaagtggtcttgtattcaggcctggacatcttaattatatctttgctctcaagaagaaatcctttgatattgttttctgagttctgaatagctgatgaaaatgaccaattgaggaataatcatactttttcttcatctaaatcttacgcttttgagttatcttagcataaatgtataattgtattttaagtggaaatttgtcacttaatcttgatttctctgtttttaaagcccttcaacaagcacatttattgaaaaacatgagtcacagcaggcagccttctgacagcagtgttgataaatttgtgttgagagatgaagctactgaaccgggtgatcaagaaaacaaggtgagggacataggcttgagacaacttggtgtttctgagcttgtgtgaggatttaaaatcgccctggctactatctactttattgctttcccatccctgggcctttaaatttcccctttaaataccagctcttcccaggcctgttgttttccgcctttcaggtgctactgacagcgttaagaattgcctgagttctgcctcctttgagagtgtgccccagagaaatctattctgtactgagtgtttccttgtctgatttcttgggccattcatttgatggctgcgtatggccttgcaccatgttttggttctattgaactgttttaaaagtctctgtttatattacctttttacatgtaaatgtaactgtcttcacttttaattgctcaagggcaaggaatagcgtttcacagtttctcccagcaatcagaattacagcctttggcatctccctgtctaccaggcccagttcgtcttagctttgggcttccccaggctgttacctttccctgagtagcttctgcttgtcctgtagaagaccactcatgctttgcttccagagcagccttttctgaatgcctggtgtcaggtgccttcttactgtgcccaccctccctgcatgctgcatttatcccctgccacagccctgggaccctgtgtccagctgcctctgacttgtctgtttctgcttggtcatggtctctgtgaggtcaggtgtgcatatgagcacagaccagggcatctctttatccccagcacccagtgtaagtgctactctaggactatttgttgaatgaactaatgcatgaatgtattggttgagtatgagacaaacaagtgtcactgtctcctttctagccttgccgcatcaaaggtgacatcggacagtccactgatgatgattctgcacctcttgtccattgtgtccgccttttatctgcttcgtttttgctaacagggggaaaaaatggtgagtacaaaaggggacgtgcagagttgaaggaaataactaggtttcagaggtcaacttggtgcccgtttagtactgtgtgtagcagaggcagtagaatctgaggatgagtttggttttcactagccaaggggaagggaggaaatgatgggagcaggtaggttactgggtctggttttgttcatttgaaaacaatctgttgtttgaggctgaaggtggcttgggtgatttctttgcagtgctggttccggaccgggatgtgagggtcagcgtgaaggccctggccctcagctgtgtgggagcagctgtggctctccacccagaatctttcttcagcaaactctataaagttcctcttgacaccacagaataccctggtatgttaaaagttcacatcttattttctcagatttaatcattattgtaaaaacgatttcagtattgactattttagttttagagcggtgttttgagtttatttgggatttttttttttttttgagacggagtctcacgctgttgcccaggctggagtgcagtggcgcgatctcggctcactgcaagctccgcctcctgggttcacgccattctcctgcctcagcctcctgagtagctaggactacaggcgcccgccactgcgcccggctaattttttgtatttttagtagagatggggtttcactgtggtctcgatctcctgaccttgtgatccgcccgccttggcctcccaaagtgctgggattacaggcttgagccaccgcacccggcctatttgggatatttgacccgcgttgtagctcttcagaaaacacatgaatagtgaagttctttgtttcatggtttctctttagatgaaatccgtagaggaaaaaaatagaaacctcagcacgtaagagccaacttatatacgcatcggatttaaacctaaagcacaaattgtgcatggtcacggtggcgctgagtcacactcagccaggccaggcattcacactcagggtgagtgggcaccaggactggctgaggcagcagtggacccgtgtctgcaccctgcccatgcttattgtggagccttctcgctcgctctctttctttgggtgagagggtacacttgtgtttttgaatttatatgaggtaagggtttatatatagggttttttctaatctttttttaagtggaatctggaattttaatcagatttactatctgacagcctagaattataatccagaaagtctgtggtattgaggacatattggcaatatgatgaatctgtaatccttaaatcctgaaacttttttttttttttaatcacttagggttattatagtgaagtcatttctgaatttggatcttctcttcatacctctttttctctttcctgagaattaagcttttgttttgagttagaaagttgatagtaggaaattgttccatggctgggcaatttatctccacagaggaacaatatgtctcagatatcttgaactacatcgatcatggagacccacaggttcgaggagccactgccattctctgtgggaccctcatctgctccatcctcagcaggtcccgcttccacgtgggagattggatgggcgccattagaaccctgacaggtagtggccagtttttcagctgtgttttttctagatatccttactaaggtttccgtttccatgacgatgtttgtttctgttcttctgtcaggaaacacattttctttggcggattgcattcctttgctgcggaaaacactgaaggacgagtcttctgtcacttgcaagctggcctgtacagctgtgagggtgagcgcgatctctgtggagccattgcttcacttagtgggcattttatcattgctgcaattacaattggagcttaataggaaatatttccatacactctaaagctgtaaccagtaatatccaccatgtatccatctcttagctttagaaagaaaacattgccagtaaagttaatgcttcataaacttcagtttaagttttaattctcagaatatttgtttgaaatagacttcttcctaaaggatatatttagaaataacctatcattacatgtaaagtctgttgaatatgctgggcacggtgactcatgcctgtaaactgagcactttgggaggccaaggtggaaggattgcttgagcccaggagttcaagactatgggcaacatggttgatcctgtctctacagaaaattaaaaagaaaaaaaaaaattaactgggcgtggtggtgcatacctgtagtctcagctactcgggaggctgaggtggggggattacttgagccccggagatgaaggctgcagtgaggcatggctgcatcactgccctctagcctgggcaacagagtgagactgtctcaaaaataatagtaataataatccgttgaattaaaaaaaaccccaaaaaccactgtgttaggcccatggtgtagtaagagttaaagtgagccttagggattatttactcaacctctgtgtttgtatgaagtggaatggccccagttctttaagtgatagcatgttgaacctttccataccagctggctcgtaagtcacaactggccagtcaacaagagtcaaaattaactagtaaaaatcaaagcaaaaaacttagaattgtcgaatttgtgcgatacctcccccttttaaaatgtcatgcctgacagtaatttttccctagtttccaggttttgtttcagtcaattgtgtctgtcttgagcagaaggaagcgtgctaacagctcagtctcatggctagctgggggtctatgtgtcagccatgcatgtgatggtgcccctgggtgcctgaggctgcaggggaggggtacagcagtaggggcctgttctgttctcccgtgccttggagtacatagtgatatagtggggtggtccttggtgtaggtccctcgttcctaccctgggtctgcgatttatttagaagtggtgttggagctgtgcggcaggcccctttgtaactgatcaatgtttgtgaagttgccgtttgagaattgaaaccatgacataagcagaaatggaagaaaagaaccagttatttgaaagggacacattcacttttaagcttgtatttactgagataaaatatataccatcagtgttcttgagaggtgtgggaaaagtgcaacatcctggttgcagttaaacccagaacgttgtgtgttgaagactgacagttctcaaaccgtcaagacgcgggtactgagtgggactaacctgctgccctcttgcctcggaccttgtgttccagcattgtgtcatgagtctctgcagcagcagctacagtgagttaggactgcagctgatcatcgatgtgctgactctgaggaacagttcctattggctggtgaggacagagcttctggaaacccttgcggagattgacttcaggtaagtgagtcacgtccattagatttcatgaactaagctcaattgaaagtcctggggtcacttggtataaggaatgatgttatcaagtaccctgcccatcagaaatctgagcggtttaggtagatgacagtgattttctccccccagtggctttttgctgaacctcgccctatgcgtggattttattttattttattatttatttagagacatgatcttgctctgttgcccaggcttggatgcagtagcacagtcatagctcactgtagctttgaactccaggactcgagtggtcctcctgcctcagactcccggttagctaggacaataggtgtgtgccatcacactggctaatattttattttttgtagaaatggggtcttgctctgttgcccaggctagtctcatctcctgagctcaattgatcctccaatcatggcctcccaaagtgctgggattacaggcatgagccactgtgcctggcctagaattttaaaagataaatagaagagtagttttttttttttttttggatagtcctagtcatttaagtgttctggatagtaggaataaaagagcttagaatttttcatctttgtcttaaactttttaaaaaatgtagcttatgttaattctgcttgttttaaaagaatatactcatcattatactgaacctaggtaagacagctggtttatattttgttgcaattaaaaaatgtgagctgtggttgcagtgagccaagatcgtggccattgcacttcagcctggcgacagagcgagactccgtctcaaaaaaaaaacaaaccaaaaaacgtgagctgtgttggaactttcattttctaagagtaaagttttggcaggagaagttttctgtcagtactttattttagaagggaaatttttataattcaggtgttttgtttttgtttttgtttttccccccaagccaccttttatagagcccttgtgggttattttatttaatccttagaatgtttataaatctgggactgttctcggctccacccacagataggggcgctgagcatgcgtgagtgggcagcaagatagcaggttatggagggcccagctcgccccttctgtggtttgagccagttctgtacgggacttacagagtgttttgaaatagtatttattttgaagaaaaagaaaaacagtttactgagtgctatcttattgagtctggagttgtgagaggaatgccacccctatttgtttgaagccatcggccttttctgttgtcttgagtaagtgctgcccaagggccttccagggcgcctgactgagcctgctctgaagcaagctggcggaaagtgtttactgagtaactaaatgatttcattgttaaatgtgctcttttgttaggctggtgagctttttggaggcaaaagcagaaaacttacacagaggggctcatcattatacaggggtaagcggcttatttttgtgagatactgttttaccttaaggaggtgaaagtgaggctttccttgtggaatttctctaaatgcattcatcgtattttagatctgtttatttcacagtttatatcatgaaagttataattgtgtcacatggatttaagtctagcaatgttgagttctttctcactagctttccaaaatatcttacctaaaatttagtcaaatacaagattatgtttatttttattatccttctctctaaagcttttaaagctgcaagaacgagtgctcaataatgttgtcatccatttgcttggggatgaagaccccagggtgcgacatgttgctgcagcatcattaattaggtatttaccagtattttatctcttttacttttttggttgaagtactaaaaggtatgaacatggaaagagagggaagaattcaaaggatgtagagcagtattcctgaatctgagctcatttcagctattctgttcttaaactatcaagaaaaaaaaatccaaaaaagtctaaaattataattaaaaaaacaaaatactaaccatccattgtaaaaagtaatgcattttcattgtaaaaatttggactatagagaatagcactaagaagaaaaaaaatcaccttcaattctgctaccacctggaagtaatcgctgttaatattttgctgtatactttttatgagtttcttattcaaaatggggtcaaaattacatgcaattgtgtaacctaattttcactgaatattttattagcatttttctgttatgaaacagtaattttagttatgggtcattgttttactatgtgattgtgataaaattttacataaattttttttggaaattaactattgtacataaatgtgtataattttctttttccgagaattcctggaagttgagttagcagcccaggctttgaatttttttttttttttgagacagagtcttgttcgtttgcctaagcgcgatctcggctcactgcaacctccgcctcccaagctattctcctgcctcagccccccgagtagccgggattacaggtgcacaccaccacacccagctaatttttgtatttttagtagagacagggtttcaccagattggccaggctggtctcaaactcctgaccccatgatccacctgcctcggcctcccaaagtgctgggattacaggtgtgaaccaccatgcctggccaggctttgaatttaaaaaaaattttctaatagctttatggcggtataatttacatttcttgaaacctactcgttttgagtgtatagtaaacttcaattttatcacatttctatcaccccaaaggtccttgggcccattgcagtaacctccggttcccgcccccattcctaggcagccactcatctattttctgtcccttaagatttgtgttttcgtcaggcacggtggctcacgcctttactcccaccactttgggaggccgaggcaggtggatcatggggtcaggagtttgagaccnnnnnnnnnnnnnnnnnnnnnnnnnnnnnnnnnnnnnnnnnnnnnnnnnnnnnnnnnnnnnnnnnnnnaccctgtctgtactaacaatacaaaaattagtcaggtgtggtggcgggcatctgtaatcctagctacttgggaggctgaggcaggagaatcgcttgaacgtgggaggcgaagttgacagtgagcagagatcgtgccactgcattccagcctgggcagcagagagagactctgtctgaaaacaaagatttgtattttctggacattttatagaactggggtcatagtataaatggacttttgcatttggcttctttcacttaattttgagattgggtcttgtagcatgtatcggtagtttgttcatttttattggtgagagtattatatgaataataccatattttatctatccatcagatggatattattgagttcatgttttggccaatttatgaattatggtactgtgaacatttgcctacaagatttgtataggcatgttttcatttctcttgagtggataacctagaagtggatttttaaataatttttggtacttactgtgaaactgctcttcagaaacataccatcgtttgtcctttctttcttgtctttctctttctttctttctttctttctttctttctttctttctttctttctttctttctttctttctttctttctttctacatagacacattttaagaaaaatttcagtagtttttggggtacaagtggtttttggttacatggctgaattttggttgcatggtgaagtctgagattttagtatacttgtcacccaagtagtgtatcttgtacccaatatgtagttttctgtccctcaccttcctcccagcctcccgccttgtgagtctccaatgtgcattataccactctgtatgcccttgcgtactcacagcccagctcccacttctgagaacatactgcagaaacataccaaaggatactcccactgccagaatgtgattgtgcctgattcttctcaccaataaatatttcaaaaaaagttaaatatatatcagttttttgggcagaagttgatacttctctttattttttatttttttttgagatagggtctcactctatgatgcccagactggagtgcggtggtgccatctagcttactgcagtctctgcctcccaggttcaagtgattctcccacctcagcctcccaagaagctggaattacaggggagagccactactgccagctaatttttgtattttttggtagagatggggtttcaccatgttggccagactggtctcaaactcctgacctcaagtgatctacctgccttggccttccaaagtgctgggattacaggcgtgagctaccacacccggctgatatttctttttaaaataacttaccttcttttgaaagtaatacatgttaaatgaacaaaatttaaggaaaatataaaaaaggaaataatctttataatgaaactactgaaagaaaaccaaaattacattttggtgcatattctttttcgttttcatcattgtaatttgcatttctttgattacttgtgagacacacttttcatttacttaaaggttcgtatgacttgcctgttcagaaattttgcagctttaccattttctgcaaatgatagcaacttctttttatttttttatttttatttttatttttatttttttttttgagacggagtctcgctctgtcgcccaggctggagtgcagtggctggatctcagctcactgcaagctccgcctgctgggttcacgccattctcctgcctcagcctcccgagtagctgggactacaggcgccgccacctcgcccggctagtttttgtattttttagtagagacggggtttcaccgtgttagccaggatggtctcgatctcctgacctcgtgatccaaccgtctcagcctcccaaagtgctgggattacaggcttgagccaccgcgcccggccgcaacttctttttatttgtttgtttgtggtgacagagtctcgctctgtcacccaggctggagtgcagtggtggaatcttggctcattgcaactattgcctcctgggttcaagcgattttcctgcctcagccccccaggtagctgggattacaggaatgtaccaccatgcccggccaatttttatatctttagtagagatggggtttcgccatgttggccaggctggtcttgaactcctggtctcaagcggttcccctgtctcggcttcccaaagtgctgggattacaggtgtgagccaccctacccagccaatagttacttcttatattccagaaaaaattgtactcatgatcaagtctccatgaggaaaaagactttaattaaagatattgcagtttgcagaccaatatgataaaatagttgattgtttctaaaagtattactgagtaatgatggcagatataagcccttttgtttttgtaggaaaatgttacccatgttctgcatttgaattcagtttagatttgttaggaatctcagcttaagctttgccatctgggagtgtttgggacaattttgcagacagaattgcaaaagtgcctaagggatgcaactggcactcagacctgctccttgctcagtactctgtggacagatgttcagcgcttgttgatgttgattaaaaggtttagaaagagaactttcaaagttggtttttaattaaagcatttaatagtgtgaataaaaagggacttaattttatgacagacaaaagaaagtacagcacctggcggggcgcgggggctcacgcctgtaatcccagcactttgggaggctgaggcaggtggatcatgaagtcaggagttcaagagttcaagaccagcctggccaaggtggtgaaaccccgtctctactaaaactacaaaaattagccaggtgcgttggcaggcacctgtaatcccgctactcaggaggctgagacaggagaatcacttgaacctggatggcagaggttgcagtgagccaagattgtgccactgcactccagcctgggcaacagagtgagagtctatctcaaaaaaagaaaaaagaaaatacagcacccagttatgtcagagtgggtgcatcagagagtgaccctgagattggagacgatgctgtcacgtgcttgaagaatgctacctgagaaagggggcgagaagtggtgtttgctggtaaccagaggtgttggcttagccacctgcagggagggtggtctatcacaggtgagtttcatctactttcttaagcaaatcaaccttacttttgtgttaggcttgtcccaaagctgttttataaatgtgaccaaggacaagctgacccagtagtggccgtggcaagagatcaaagcagtgtttacctgaaacttctcatgcatgagacgcagcctccatctcatttctccgtcagcacaataaccaggtatgctgacccagtggcgtcctcacattgttgggaaaatgccctttcctgatgcctttctttaggctttaattgaaaacattttattttctagaaaaaagctttagctcaggatgtttgagtgtaggtcattcctttgataggatattgtcattctgaggattgaccacaccacctctgtatttaagccctgccacaatcacacagctgtgacactataaatcttttaatcgtttattacatttaatgtgctgacagttatatttttgtgtgtgacacttacgtattatctgttaaaaaattttcactttagttgtgttacctttaaagaggattgtattctatcatgcctgttgatttgtaggtgagcgggctattaaagtcagtgttatttagggctatccactagttctgtgatttgcaatgactctccttcacatttgttgtggagcttttgaatatagcgtcaaatggccacatatatcccatgcttacctgattcttaggtgagtaggacagagtgctttaatgaagctataatcttcagaattctagcttgcaaaggagattgcagaaggataagacttgtgcttttcaattttgtcttttaaatgttattttaaaaattggctttatatgatactctttttctgctgagtaacggtattttacagaacttggactagatgacttctaagcttaaatgatcacttgatgctttttttctgaattaggaactcagcttacacatttcaaagtcataattcctgaatacataacatctttttttcatgtaaagactgctttaaaaaacacatggaaggtcgggcgtggcggctcacacctgtaatcctagcactttgggaggcccaggcgggcaggttgcctgagttcaagagttcaagaccaccctggacaacatggcaaaacctgcctctactaaaacataaaaaattagccgggcgtggtggtgggcacctgtaatcccagctacttgggaagctgggggatgagaatcacttgagccctggaggcagaggttgcagtgagccaagatggtgccattgcactccagcttgggctacagagtgagactgtgtctcaaaaaaaaaaaaaaaaaaaaaaaaaagccacaaaacaacaacaacaaaaacacacggaaacattttatttggccaccttagtatttccccttcagataattcctttgtttaaactcagaactggcattttctctctttgaaaagattcaggacaaatactcctttaagataagcagaaacagtgaaagagtatttgattatcaggaatttgataggcttagaataaattgttgcttcttaatgtcatttcagaagatgaatattaatagatgccaactgagatatcattaaaattggttactactactttgaaaagtttcccagttccaaacttcagcaggcctcttcacaattcaacagtgcttaattgggacttgtgtgatagatacgattcccaattgtgtagcagagtgtgctgcttagctacctattctgttagcattcgtgtgttaacttaaaatcataatctccttagttttgttgagtgtctctgtggatgagacactgtgagggatacaaaatcagattggctttattcaaaccattggggtattatttttattttttgccttttttccatgtgttctaaaggaattagagtttgaatataactataatgggggatagaaatttacatgtgccatgaagggaatgcagaaaagtgccatgggagctcagaagtggagaaaggaattttttttcttggaagcaggagtaacttcatgaagcatttatttcaacttagagatagtaggcaatgctgtaaggggagtgtggctgcagcgaaagtgtttggggcagactgggaggaagggagggaataaattcagccattgttatggcataatgatcaaaatttattttcagcccctctttcacttaaaagttgagactgcttaacttcttttaatctttaatcttaaacttttaaatgccatttgatctttaaaaagatatgttttaatagtatattttaagtctctgtatttttcttattagaatatacagaggctataacctactgccaagcataacagatgtcactatggaaaataacctttcaagagttattgcagcagtttctcatgaactgatcacatcaaccacgagagcactcactgtaagtctctttcttgattggtcttaatgaaattataataatttttcgtgacttgtatggccagttagttttatggtcatcttatggtgaggtgcttgtattagagctcttacttatctgtggggcttgctaagaaattgtgtttctgtgaaaaggatcttagcttactccaggaatgtaaataactatttttttctgattattaaagtaatacatgccaaaagttaaaaaattcagccaatttaggaagacataaaaatgaaaataagccaggcgtggtggctcacacctgtaatcccagcactttgggaagccgaggtggggggctcacttgatgtcaggagttcgagaccagcctggccaacatggtgaaacccatctctactgaaaatacaaaaattagctgggcatggtggcgggcgcctgtaatcccagctactcgggaggccgaggcaggagaatcacttgaacgtgggaggcagagcttgcagtgagccgagatcgagccactgcactccagcctgtgcaacagagcgagactttgtttccaaaaaaaaaaaagagaaagaaaactactgtcacctgcatnnnnnnnnnnnnnnnnnnnnnnnnnnnnnnnnnnnnnnnnnnnnnnnnnnnnnnnnnnnnnnnnnnnnnnnnnnnnnnnnnnnnnnnnnnnnnnnnnnnnnnnnnnnnnnnnnnnnnnnnnnnnnnnnnnnnnnnnnnnnnnnnnnnnnnnnnnnnnnnnnnnnnnnnnnnnnnnnnnnnnnnnnnnnnnnnnnnnnnnnnnnnnnnnnnnnnnnnnnnnnnnnnnnnnnnnnnnnnnnnnnnnnnnnnnnnnnnnnnnnnnnnnnnnnnnnnnnnnnnnnnnnntttagtagagatggggtttctccatgttggtcaggctggtctcaaactcctgacctcaggtgatccacccgccttggtcacccaaagtgctgggattacaggcgtgagccaccacacccgtctttacatttttataataataatttatgttgctgatattagaaaagaaccataatatccaagaattcaagaacaattaaattatgtacatatgctagtgtatagtgtgatgctttggagaatttttaacaatgtggagatatataatctgaattgtagtattgagtgaaaaaaggcagaatacaaacctagtagggggtatagtcggatttcagttaagaaaaataatatttacatatatacattcctcacattggcagataatcaccaagatacattttgggattgtggatgatttttgtgttctttatatttttcaggtattctcaaattttctaaaatgagcaagtataacttttgtcatcagaaaaaataatatgcaaaagtaatgttaatttgttggtgaccaggttaaacctttttatttttattattattttttgagatagagtctcgctctgttgcccaggctggaacgcagtggtgtgatcttggctcactgcagcctctgcttcccgggttcaaacgattctccagccccagcctcctgagtggctggaattacaggtgcagggcaccacacctggctaatttttgtatttttagtagaggtggggtttcaccaggttggtcaggctggcctcgaactcctgacctcgtgatccaccctcctcggcctcccaaagtgctgggattacaggtgtgagccgctgcacccagccaaacctttttattttatttgacaaaagaaatacttgcatgttatagaaaactaaatattgtttgggctgtctgcagtatggtcttctcttgatttgttcaaaatattgtaaactttgatttgttcaaaatattgtaaactttgcttattttttttgttcttcccttgctttgttcaaaatattgtaaactttacttatttttttttgttcttcccttggtttgttcaaaatattgtaaactttgcttatttatttttattgtggctgacatgtgtcagacactgttgtaggcctgggatgtaaaaacaggattcctgcccttacggtctctggaggctggtcagggagatgatgtggtcagctggagctccgctcctaaggttgtgcaggggcagttgagaggcggaagggtgggacagcatttcaaggtgtgggcagcacaggagtctctcttcattgggatataattgccattccgataacatgtatttgagttgtctaaagtaggaagttgtaccatggtgggacagatatctcatggttatcatacacagatctcagttctcattgtttgtactttttataaagggtaaaaggagatataattcaataaacctttgtggtgtttgggtgtgattttattgtttctttgttctatagtttggatgctgtgaagctttgtgtcttctttccactgccttcccagtttgcatttggagtttaggttggcactgtgggtatgtattttcctcagtatgtattaatagttgtctacaacagtataatataaacgtagttattaggatgccctttttctttctttttaagtcttttatcagtttggcttttgcaaaaatatctgatagaatacttgtttctgctgtattagttgtgtgagactagtgacaggagctgtgggaattgaatgccaaatgttcttaggcatttttgggaatttgagggtgtgatcttcaagttcatctaggggaattttcatatgctggcaaaatacttttctcattagcttgattctttccagaattatttgctgcatattagaagtttaggaaccttttttcacttaaatgtgatctaacatatgaaatggtgatgatttaggaactactgtacttacattaacagcttttacttaaaaatgattttcccccagtagatgaccctactcacatctgggaaataatttcaagtcttctccagcattcaggaataagctttcattctgtgtatcaattactgagaatgattttggtgactcacatcacatttgagaagtaaacctgtagatttcttgtgtgtgtcagtgaataaccagctgacatttgcttgaagtggattacattctctgctctagaatgattgctttcccgccttcctcacatatagactgagcaactatggtttctagtcataggtccggcactagacttgacttctgagcaactttggcattggagtaaaatgtattaatttaaagaaagctaaaaattcattcaagtaaacatacagttctaatactttttaaagtttaaaatatagataggtttaagtgataaaaaaatatgagtagacaccataatcctcatttctgtatctgttcacaaggggttgatatttatgagttctattctccatacccattctgtgttctcttaatcctcagtcagcacctcaggtggttgggattcagttcttggtagtttgacttatactctcttttctaggggattgagccctgggtagtcctccttatatgagattgcaatttgtcttccaataacttttactacaagatatggggtattaaaggatgccattggggaaccaagataatattagtatcaggaaaactaaccacgtcagacctgccccattgggtatcaagtatactatttttccatagtaataaagagctcaccccagccaattctcttttattttggacctgtttattcaatggcattaagatgcccaaatgtctgggtagctatctcatctccaattcagcagaaccattgtcatatgccctagtggaagcattccttcattggacacttaggccccagtacttttattcagatctactacctgatttcatttctcaaatgatttttatggagctttaatttataggaaagttgttagttgattaacagtaaaacagtttctgagctggtataaaacatattgtgacacgcttttctcttggaattgcaagagaaaggaagactgttgtttgcttgaaatttttctataatttgaccttgcaaatgtctgcttccagagtgcctccactgagcgcctccgatgagtctaggaagagctgtaccgttgggatggccacgatgattctgaccctgctctcgtcagcttggttcccattggatctctcagcccatcaagatgctttgattttggccggaaacttgcttgcaggtactgagttgaagcagggactccgaggcttggattttgatttccttagggggaatgggggtggtgagcatatgaggggaaaatactaaaaggtcatcgccagtgatggcttgtccctttagtcaaatttcagatgttacctatatgcacaaacacatgcagctgttctgtgctgagtattttaaagtggcctcttcccagtatggcccctcagttaactacaaataaactcattttgaatttcatcttagtgggcaccatatgccagtactgcctcaggcactgggatggtaagaaagtataaagtatggactccattctcaagttggttttagattagaggggatacatgtaaacagaagtgcagtggtcacacagagtggccatgatcactctccttgggcagatttatgggctgataggaaagggcacaacagggagagggtgcagcaccgtggcgatgataatggaggatgtggccagcaaggaagacgcagtccattgaaattgattttgggagaagttgccaatctccatgaaagaatcgggacctgtgttctttgctttaggaggctataggagagtttcgtgaaagggactaaaagatgagtattttaataagatcattcagccaacttgaatgtgggctggaggagaaggtagagagactcaggagattaatgttgacgctaaggcaagagatggggagtctaaaccaagataatggctttgggattgtagggaagacactgatcgtaagagaatgaaggaggcagaattgccaggcctgggtcaccaactgaacttcggttgtgaagaccaagaaacctgggatgacttcacatcctgggcaggtgtgtggtagtgacagtcatggaaattgggaacacagatttgtggggaagacatcagtttgagtttgagtttgagtttgagtttggcttatccgttgaatatcagacacagatgtctggccaactctcaacatagattagggtcttaaatgacttcagttccccaagcaatttgtccttcccatactgttgggctagagaggtaatatctatgcccatatcacagccagtgctcctaaatctctgagaagttcatgggcctctgaagaagaagccaacccagcagccaccaagcaagaggaggtctggccagccctgggggaccgggccttggtgcccatggtggagcagctcttctcccacctgctgaaggtgatcaacatttgtgcacatgtcctggacgacgtggctcctggaccggcaataaaggtaatgtcccacttaggtgctggattaatatagccttaatgactgtgggtttccagactatctttatttagtaatctgtctcttctttattctcttttactttaaatgaacaaaattgctcagattgtgacactaaatttaacatcaaaatgtgaccatgtggccgggtgcagtggctcatgcctgttattccagtactttgggagactgaggtgggcagatcacttgaggccaagagttcaagaccagcctggccaacatcacaaaaccccatctctactaaaaatacaaaaaaattagttgggcgtggtggcacatgcctgtagtcccagctacttgggaggctgaggcaagagaattgcttgaacctgagaggtggagtttgcagtgaaccttgattgtgccactgcattccagcctggatgacagagtcaggctctgtctcaaaagaaaaaaaaaatgtgaccatgtgttttacagctcctttggtatcatcagtcactgttacccctaagagggaaatacatagctttagttttaggtttccatcattagccaagaaagctcagaattggttttcctggctaaagtacctcattgctgtctccttaaatcttagttaatggctactgtcctggctagcatagttatagagcatgtccatggttgtagaatgttctgccaatctcagggacagttttgcttttctgtgaagcaataaaatcaacttcaaaacaaatgttaactgtttgcacaatggatttaagatagaccagttcacatacttttttttttttttgagacggagtttcactcttgttgcctaggctggagtgcaatggtgcgatctcaggtcactgcaacttctgcctcctgggttcaaacgattctcctgcctcagtctctagagtagctgggattacaggcatgcaccaccacacccagctaatttttttgtatttttagtagagacggggtttcaccatgttggtcaggctggtctcaaactcctgacctaaagtgacctacccgccttggcctcccaaagcgttgagattacgggcatgagccaccacgcccagcctaagatagaccagttcacttactgttatatctgtttactctctctttgctgtgtcttctacctttaaaaatctccccactaacttcccattctcctttagctgccatcagtcacttcccttctctgcaaacatctctggagagtctcagcctcagcccacagagcttcccactgctctgaggtggaccttgtttgtaagacttcttggccctcttggcctggaccctgtctactacttcagccatccttccttaaccatcgctagtggtttttgttgccaccctccatagcagcgtttcccttccagatcatgtctttacatctctgggcactgctctggtcctgcctgcctttccctctctgtaccctgcaggccgctgccgccatcttgagtgtcctcttcacttggctttcagagggcccacagagtttcccactgctctgaggtgggccttgtttgcaatacttcttggccctcttggattactgcactagccttttgttttggaaacagcatttttaaaaaaatttaattttatttttttgagataggatgtcactctgttgcccaggctggagtgcagtgtcatgatcgtagctcgctgtggccttgatctcccaggctcaagtgatccttctgcctcagcctcctcagtagttgggagtacaggtgtgcaccaccatgcccagctagttttttgattttttttcttttttctttttttttgagacagagtctcacactgtcgcccggactggcacaatcttggctcactgcaacaacctccacctcccaggttcaggtgattctcctgcctcagcctcctgagtagttgggattacaggcgcctgccaccacaactttttgtatttttaggagagacggggtttcaccatgttggccagtctggtctcgaactcctgatctcgtgattcgcctacctcagcctcccaaagtgctgggattacaggcatgagccactgctcccagccaggaaacagcattcttgagataattcatataattcacccatttaaagtatataattcattctctttagtatgcccacagagttgtgcagccatcaccagaatcagttttagaacccacaaaggaactctgtacccttcacccaaaaccttccatgcccccagctgcaggcagccactgacctaccttctgtctctgtgactctgcatcttctggacattactgtggatgggctcatacagtcagtgagcttgtgactggtgccttctaccaagcagggttttcagtgcagtagcctttctttcttttttttttttttaaattgagacggagcttctgcctcccaggttcaagcgattctcctgcctcagcctcccaagtagctgggactacaggcccatgccaccatgcctggctaattttttttttttttttgtatttttagtagagatggggtttcaccatgttagccaggatggtcttgatctcctgacctcatgatccgcccaccttggcctgccaaaatgctggaattacaggcgtgaaccaccacacctggctaacctctcatgtactgtctgcggttcttccctgatgccttccagtccatgcacccgattgtagcccctcatcctattatggtttaaggtgactgtcttagtcaccatgggttgccataacaaaataccatagcctgggtggcttcaacaacagaatttacttctcacagttctagaggttaggaagttcaagatctaggactttcaccttgccctcacatggtgagggggtgagggagctctctggtgcctcttatatgtggacgctaatctcattcatgagggtctgccctcatgccccagtcacctctcaaaggccccacctcctaataccatcaccctggtaattaagtttcagtgtatgaatttgggggactatagacattgaaaccataacaagcacttttctaaaagatcagggagtgagtaagtaccagagctaggacctcaattccacctctcggtcatcttgccttcactctgctccatgatggctgcctcctagagtgatgggagcctccatgttttatattctctcatgtgttgtgtattggagagagttcagactttatgaatacatctggatttgttgacttctagctttgctggtaaccagctgtgaccttgagtaaattacttcatctctgagcctgtttcctctttttgaaaagggagtttaaaatgctgttttgggttgggcatggtggctcatgcctgtaattccagcactttgggaggctgagatgggaggatcacttgagcttggagttcgagaccagcctgtgcatcatagtgtgagatcctgtctcctcaagaaattaaaaaattaactgggtgaggtaacgtgtgcctgtgggcccatctactctggaggctgaggtgggaggattacttgagcctgggaggttgaggctgcagtgaactatgattgcgccccatcccgggtggcgagtgagaccctatctcaaaaaaaagaaaaaaaaatgctgctttgcacccctttctcatgtcatggtgtcatggctaacatcgaatgccctggttgtttgctgttggaaggcgtgggcctaggggctccctgaggactccttccatcttcaattcgttctctgtgtacctgttagcaagttgtgggccagtccctgccatgtaccattgtgtgggtaaaagtaaataaaatgtgtacagtgtctgaactgtacatataggggtccaagaacaaaatgaatgacatgggttagctctttctaataaatggtaaaaccaaatattctaattttcagttttgttatacttccatcacatgtttttgttttttgtttttgtttttctattttaggcagccttgccttctctaacaaaccccccttctctaagtcccatccgacgaaaggggaaggagaaagaaccaggagagcaagcatctgtaccgttgagtcccaagaaaggcagtgaggccagtgcaggtaggaaacagtgtggggaagggagggacaggagtgcagcatctgtcatgtagcaacataggatttaagtaacttggtgttttagagaaatataatacacatcagtaaagtgagagaaggtttctccaggtgcggttcaagatattagaaactaatgactaatatacacagaccaccttttggtctgaagcatctctaagtgccacctgctgacacgcagcccctgcagcctccaggcttccagccccagcacggagcctcactctcctgtgcttccctggttgcgggtgagggctggagaggcctcctgattttcagtaagggaagtggtgtagatgcttaggaatagatatagtgagtgaaaaaattgattctgatatgtcaaaatttctgattggaaatggaatatttacatttggaagaactaaaggagagagaaagtggggataaagtcatctgagttggaggagcttaaaccatgcacaagtttggaggacctttttttaacccatgaaaaggtcagaacagaaggggctaggatttagttgtgactgcagtttttcgaattcccatccatactgctcttggagggcagtggcaggggcaggagaggagcctggcaaagcatgaagtgactgctgctgcctctgctatctgggtcgcctggctgcctgtctgtacagtctccctccaaacccattctctcgctgtctcttggtgcccaggggccagtgatggttctcccgtttgttttgtgtatatagcatttatatcaaggctatttatttatttagagacagagtcttgctctgtcgcccaggctggagtgtagtggtgcaatctcggctcattgcaagctccgcctcccaggttcaagcaattctcttgcctcagcctcccaagtagctgggactacaggtgtgcaccactacacctggctaattttttgtattttttttagtagagacagggtttcaccatgttggccaggatggtcttgatctcctgaccttgtgatccaccaacctcagcctctcaaagtgctggaattacaggcatgagccactgcacctggcctatttatttatttttaattgacaaaattgtatatgtctgtagtatacaacatgatgtttgaaatatgtatacattggccaggcgcagtggctcannnnnnnnnnnnnnnnnnnnnnnnnnnnnnnnnnnnnnnnnnnnnnnnnnnnnnnnnnnnnnnnnnnnnnnnnnnnnnnnnnnnnnnnnnnnnnnnnnnnnnnnnnnnnnnnnnnnnnnnnnnnnnnnnnnnnnnnnnnnnnnnnnnnnnnnnnnnnnnnnnnnnnnnnnnnnnnnnnnnnnnnnnnnnnnnnnnnnnnnnnnnnnnnnnnnnnnnnnnnnnnnnnnnnnnnnnnnnnnnnnnnnnnnnnnnnnnnnnnnnnnnnnnnnnnnnnnnnnnnnnnnnnnnnnnnnnnnnnnnnnnnnnnnnnnnnnnnnnnnnnnnnnnnnnnnnnnnnnnnnnnnnnnnnnnnnnnnnnnnnnnnnnnnnnnnnnnnnnnnnnnnnnnnnnnnnnnnnnnnnnnnnnnnnnnnnnnnnnnnnnnnnnnnnnnnnnnnnnnnnnnnnnnnnnnnnnnnnnnnnnnnnnnnnnnnnnnnnnnnnnnnnnnnnnnnnnnnnnnnnnnnnnnnnnnnnnnnnnnnnnnnnnnnnnnnnnnnnnnnnnnnnnnnnnnnnnnnnnnnnnnnnnnnnnnnnnnnnnnnnnnnnnnnnnnnnnnnnnnnnnnnnnnnnnnnnnnnnnnnnnnnnnnnnnnnnnnnnnnnnnnnnnnnnnnnnnnnnnnnnnnnnnnnnnnnnnnnnnnnnnnnnnnnnnnnnnnnnnnnnnnnnnngcactttaatatttagtatcggtttaatgataatgtttgtgcccttactgtctttaaaacatttttacgtcatccctgtttgattacttggtgtgctcatgaagttgttggccactagggaatcttaggctcagagaggttctggaattggtcagtggtccttgaattagccgctcctatgattctctaactgatttctcaaaaagcaaacaagcaaccacagcaaaacagctgtgcacaccactcttcttattttgttattgttttagtacttaggccgtacttatgtttgttagtcagtttctcattacttctagttaatcaaaagatcagaggcaatatttgagtattttcatactagaatgctttaaaaaaagtcattattggccgggcgcggtggctcaagcctgtaatcccagcactttgggaggccgagacgggtggatcacgaggtcaggagatcgagaccatcctggcgaacacggtgaaaccccgtctctactaaaaaatacaaaaaactagccgggcgagatggcgggcgcctgtagtcccagttacttgggaggctgaggcaggagaatggcgtaaacccgggaggcggagcttgcagtgagctgagatccggccactgcactccagcccgggcgacagagcgagactccatctcaaaaaaaaaaaaaaaaaaaaaaaagtcattatttccagtaatctctttaaaacttggcaagttattttgatctaaaagtttatcttttgtgtgcacatttttaaagcttctagacaatctgatacctcaggtcctgttacaacaagtaaatcctcatcactggggagtttctatcatcttccttcatacctcaaactgcatgatgtcctgaaagctacgcacgctaactacaaggtatgggcctctgcatcttttgaaaatatatatgcccacatacttatgtctaatggatcgttgatgtttttcttatgatttgtaggacgtataagccctttgagatatgagttacaattcgtgttttcaagtttgtctttcagctttgtttatgatagcatctgtcatacaggtgttttggattttcatattgtttgtactcacagctaagattgattacgtgagagagctaggatgtgcagccaggttattgggggaagtggcctcggtggagtctggagggatctgtgtacaggcttccttccctcctgtgaggctcacacaaaaatacagcaacctgctggtcctgcaggtcccctctgcctaacatgagccacaattccagactcacagaagcaggcgttcagcataaaccacgtgtttcaaatagtctgggcgttgtgagccacttgttatcagctagggaaagtttttatgtcagtgtaaggaactgttgaccagataaccccaagagccggcctttctgtctagggatgttttagttttctagttcatttttttttttttaactttaaaattttctattcatctgcaatttgttagatatgaagtacgcatctaatttaattttggttttggttgtccccaatgctgtttacagaagaatttttttgcactaattggcttaagttacttacattctcatagttctctagtttcatttgccattttgttatatcaatctatctgtctgctcatctattagaagcatcctttttttcctgttgtagacagtctcgctctgtccccaggctggagtgcagtggtgcaaccatgcctcactgcagtctcaacctccagggctcaagtgatcctcccacctcagctcctgggtacctgggactacaggcatgtgccaccatagccagctgctttttacattttttgtagagacagggtctccctaagttgcctgggctggtctcaagttcctggcttaagtaatccttcctccttggcctcccaaagtgctgggattacaggcgtgagcaactgcacctggctagaagtatacttcttagttattatagcttcatggtatttatgatgggatcagttctcctgttctttagaattttctggatattcttctttgttgattttgggatgtgaacaatagaatcaacttctacttgtaggttgatttagggagaacttatacctcagatgttaagttaccctgtccagaatgtgggatgctttcctatttgttcaaaacgttttaaattacctcagaagcacatgaaatttaaaggattttaaaaaaaactttaaagattatttcacatagctcttgcacatttcttggtaaatgaatcctcaggtgttcttctgtttttgttactaatagatacttctcatggttgttttttttttttttttcctgaaaatcatttgtcaaacttatgtggcttcttttctgaaggatgtttgataattttggaagatataaaagtcttcatattttacaaggtttggagtctctttaagctgcgtggttctcacgtcagctcccaaagcagaagacggcatgtcgaaaaatgccatagagaagctacttcttttccacctgttttcagctcatatcatcttgaatttcggggcacctttctatgctcctagtgcttgctgtctgtttattattttccttcctgaataccctgaactccagcatgttctgctgtaattctggcctccctggcgtcttggactcctgtttcctttgctctgtcatccccacggtcagctcctgctgcgcagcttctcagctgaactgtttggagtggctggcgggtcttgctggatctttgagtattgcctctggtttccttggttccttctgctgagttgctcagcgtctccactccccatttctcgtgtggcccttcctgctctcctctgattccttttgtcttccctggtttcttgctttggttttcagtctccgcagaacttttgccactcttctgaaaacccggaggctttttcatcttaattctcatttcatgacctcttttcccttatttgagaggtagaccttcccatggtgagcttctctttccagaattccatgtcttcttttccctcccacttacctgttgtccaggagaggtcagattgctgtgcgcattggagaagaaccctttcttccctgggctcttcatttcacatgacatcaccacatcacctcatcccttggaccctcagtggtggcactgctggatttttctttcctttggctggccttggggcacacccaggttgaccctagcttagtcatggtatttagatcaactcacattttcagtttctgtgtctgtctcttgcctgcttctgactttgcccagagaaagctttttcacaagggttcttagatttacgagcaccttctttcctgaggcagtgtttttgccaatatttattttcctagtcagtctcgccttacctttcttgttatacatgatgtctttggtcctgacccattctctgagtctgtaaaatagaattgctgtataatttaattacatgaaatcctttagaatcttaatacatcttacaccaggtgtaacattttatgatatccaaattgaacaaccctgtgtgaatttgacagtgatttctcccagggatcctaatgtataaggaataggactttgtattttctattttttgatataccacataccagatactgatcatgatggacatttaaccctttttttctcattaggaaagaaagttaggaattacatctttcagtagtgccagtgtgacctgaaagatgcctttgaaagagtagtttttgtatagctatctgaaaggaatttctttccaagatattttcccagtgctgacaacaaacacgcagacacgccctacaaggtcaatgtacagcgccgcacagtggaggcgtctgccgcagccgttaatgtttgtatctttggttgtactttacgagatcttgacggggccagtaaccgtgtgttctctccttcaccttctcaaggtcaccttggatcttcagaacagcacggaaaaatttggagggtttcttcgctcagccttggacgttctctctcagattctagagctggccacactgcaggacattgggaaggtctgtgtcttgttttgacgtgcgtcctctgggctgagttcatctaggatggagtccggttctccagggtgcctccgggagactcctccctgcgccacggacttgcatcacaggacccgagtctgactctgccttagccatgaagtttggggggaaggttctatttgtattctgtttttgtctgttatcacgtattagcttagacccagtttagtttagaaaattggtgggtttaaaaatgtgtttatagagtcctttatttcttaatttgaccttttcaagtggaaaggggcaaaacagacagatgagggggcggggcgggaggtgtgacttgctcttttgtgcctgaggaagtaacagagctggggttgacagttatattctctggttttatgtccaggaatttcccctgccgcacccctagttgatagcgaaaatgttcaaaactatgagaaagttagaatgctgtggtaaacactctattatgtacacacaacccagcttctgcagttgtttgcgtttggctacgtttcctttctatgtatatagccatctctccatttaccagtacatcttactttataatgcattttaaaaggagtgacagatgcctccctccaccaaatgtgtgtcttcacgtgaaatacagtatgtctgatgcacttcatttgttcttatgtctttgaatctttttatctggacatggacacaaggttacctagttttaatcgttacatatgttagtgcttcttctctgttattcctcatgtttttcccatgtatctatttagtgtgcgcagttgtcatttttaatggctatctagtgtcctgctgtgttgatactccatcgttcccttagagtaaaacttgttgagacttcagtaatgtcacctgctcagtgagactttcctggccatcctttcaaaacttgcttctctctgtactctcttttcctgttcatttttctctttgacccatagcatcgtctaacagtcaaccttaaaataaataaataaataaagacttcagagaaatgtccaaatacatggagtcagtttgggaatgagaaatgaggattataatccgggatgcacggcatgtccggctgccagtgcctctggtgaaggaaggggaaggggaagctgttattgtcagaaagggagagaatcacataggctccctggaagcagagttcgttggctccagaggctgaaagccagagttgtcgtcattcactggtggaattgtaggcaccgggcaggtgttcagttgagagtattttaactgaattgctgcagtcctccagaatggctagtgataaatctggtcatagaaacatgtattcacgtggaacatgcaagccatgcacagcagatatgtaaaggatgtacgggaagggtttcttctagggttgttggaaagtctttggaaacagctctaacctggggcacataagcatgaaccccatctccctttgtgctttcctagtccaattttgtctgggtctgacaaagtgatttgatccctgtatctgcaactttcacaaaacatactatttatttattttacttccttgtcttttcagtgcctatagcagtgcctggaagattgtggaatttagtgaacatttgttgaatgaatagatgttcttgttaaaaatgagttttagtgtctcatttatcttacatccacactgtggtggagccatattagcccatttcacgccataactggaagctgaaagatgtgacattcttggggccagataagtcagtggcagagcctgagttaagtctcatagattttcttttttctttttcgtttttggtggctagctttggttttatttttatttatttatttatttttattatactttaagttctgggttacatgtgcagaacgtgcagttttgttatataggtatacatgtgccatgatggtttgctgcacccatcaacctgtcacctacattaggtatttctcctaatgttatcccttccctagtcccctcaccccgatgggccccggtatgtgatgttcccctccctgtgtccatgtgctctcattgttcaactcccacttgtgagtgacaacatgcagtgtttggttttctgatcttgtgatagtttgctgagaatgatggtttctggcttcatccatatccctgcaaaggacattaactcatccttttttatggctgtatagtattccatggtgtatatgtgccacatttcttaatccagtctatcatcgatggacatttgggttggttccaagtctttgctgttgggactagtgccacaataaacatacgtgtgcatttgtctttattgtagaatgatataatcctttgggtatatgcccagtaatgggattgctgggtcaaatggtatttctagttctagatctttgaggaattgccacactatcttccacaatggttgaactaatttacactcccaccaacagtgtaaaagtgttcctatttttccacaacctctccagcatctgttgtttcattaatttttaatgatcgccattctagctggtgtgagatggtatctcattgtgattttgatttgcatttctgtaatgaacagtgacgatgagcatttattcatatgtctgttgactgcataagtgtcttcttttgagaagtgtctgttcatatcctttgtccatttttagatggggttgtttgctttttttttttttttgtaaatttgtttaagttctttgtagattctggatattagccctttgtcagatggttagattgcaaaaattttctcccattctgtaagttgcctgtttactctgatgatagtttcttttgctgtgcagaagctctttagtttaattagatcccatttgtcaattttggcttttgttgccattgcttttggtgttttagacattaagtctttgcccatgcctatggcctgaatgttattgcccaggttttcttctaggatttttatagtcctaggtcttatgtttaagtctttgatccatcttgagttgatttttgtataaggtgtaaggaaggggtccagtttcagttttcagcatgtggctagccagttttcccaacactatttattaaatagggaatcttttccccattgcttatgtgtgtcagatttgtcaaagatcagatgctggtagatgtgtggtgttatttctgaagcctctgttctgttccattggtctatatatctgttttggtaccatgctgttttggttactgtagccttgtagtatagtttgaagtcaggtagcgtgatgcctccagctttgttcttcttgcccaggattgtcttggctatgcaggctcttttttggttccatatgaagtttaaagtagttttttccaattctgtgaagaaagtcagtggtagcttgatggggatagcattgaatctataaattactttgggtagtaaggccattttcacaatattggttcttcctatccatgaacatggaatgtttttccatttgtttgtgtcctctcttatttccttgagcagtggtttgtagttctccttgaagaggtccttcacatctcttataagttgtattcccaggtattttattctcttagtagcaattgtgaatgggagttcactcatgatttggcacaatctcagcccactgcaacctttgcctcctgggttcaaggaattctcctgcctcagcctccagagcagctgggattacaggcacctgccaccatacctggctaattttttgtatttttagtggaaacggggttttaccacattggccgggctagtctcgaactcctgacctcgtgatccacccacctcagcctcccagagtgctgggattacaggcttcagcaactgcgcccagccagattttcagatctccctctctttgccctaaaccactgtgcttaataagaattctttagtggccagcagtctccatgtgtaacacattgtagcaaaatggaaaatattacatgttttaaatttgagtgtgagatatactgaaataaaaatcatctaaatgagattctttaaataataagattttcttttttgtatgtgggtttttttttaacattattattatgactgtcgtatatagaaatggctgttttcaactacagtcagtgaatgtatcaaatgctgccttatccaaataataaaagtaaatgattaacaagtcacaatttagtgaagattgatgttagttgatctttatattcctgaattagccacatggttgtgtgtgtgtatatatgtttagaggtacatatagataataagctcatctctgaaaatttttacatttggcataagaataactggataattaagcatcttattctctggcctgtgtctttacagttaaaggtagatttactcacctctccttttttgtttttctcagttcatcttttttgctatttcatgacggaggcccattttacctttctcgtatatccttttgtttgtactttggaagcctcacctgcttaattgttgagtttttaatctgtggtcttttagaggaggatgtgtagggtagaagctttcacaggttcttctttgcacttggcccttggctgttttgaggaatctccctcactaactcacagcatagcaaggtttgagatctcttctgccacacagcagttcccaggcagctggaaagatatgcagatgctcagattgtcaggccagccttgagatatacaaactactgagccttatctgtgaccttgcttaggtgaaggcatcagagcccctgcaccgacatgtgtaggcctctggatgtgtgcggggctgggtgttggggtctgagcacaagtgtagctggagaggtgagcttgttgtggtgacgggtatgagcaagttttcttcagacttctgtgagtttacctcgttccaggatttaaaggcacagagaccttagaattaaaatagaatcattttctttttctaaatagcaacactaggaataaaaaataataattccacattctttacaggtaatgttttgtttttcttgtcttctaatccttatttattctgtacttatttttatacgtatttgaaatgtattatgtgttggagttttctttttgcattatattatacacggtttttcatgtaactccttactgttccattttatatgttttgtctggtttattttaagactttatcagcaaatcgggaaaccgtctctacaaaaacaaaaacaaaagcaaaaatagttggccacagtggcatgcgtctgtggtcccagctactcggggctgaggtgggaggattgcctgagcccgggaggttgaggctgcagacaaccatggtcgtgtcactgcactccagcgtgggtgacagactttatactgtctgtttggggtgatttggtaatgatatgccctgatgtagtttttttatatcttgtgtttcttgtgcctgggtttattgagcttgggtctgtggcttcatagtatttttaaagtttggaaaattttagggcattatttccccaaagatttttttctgccctgttcccctcctttttttcctctcttaaaggggctgtgatttcctgaatgattgcttagtgttgtcccatagcttattgatgctcttttcagtgttttttgtgttttctgttttctatagtttctattattgtatttgcaagttctctaacttttcttctacgatgtctaatgtgttgtttatctgttaatctattgttaatcctgtccagtattttttttttttttttgaaacagtctcactctgttgcccatgctggagtttagtggtacaatctcggctcactgcaacctccacctcccaggctcaagcaattgttctgcctcagcctcccaagtagctgggactacaggcacgtgccaccacacctagctaatttttgtatttttattagagatggggtttccccatgttggccagactggccttgaactctgatctcaggtgattcatccacctcggcctcccaaagtgctgggattataggcatgagctaccttgactggcccctgttcagtgtatatcactaattgtgtttttatctatataagtttgatttaggtcttttaaaaatttctccctgtgtctctacttagctttgtgaacacagttgtaataactgttttaatatctttctctgctagttctaagatcttctaataacttcctggttctcggtgtttttgattggtctattgatgctccttgttgtggattgtgctttcctgcctctttgcatcgctgccaatttttggttggatgcccaacattgtgaattttactttgctggatgctagacatttttgtgttcacagagatcttcttgagttttgctctgaggttagttgagttacatgtagatggtttactcttttgggtcttgctttataatgagtactctacctaatgaaccagaaagttcgggttttccagtctgcctgctgagaacggtgactgtttctagccctgtgtgagtgcccgagcgccgctccctctgatcctttctgatgcttccctctgtggcctcagggagtttcctcacacacacagttctgctgagtactcgaggggtccttccccgatctccaaggctctctctgtcttgttctctcttctctggtgctctgtcctataaactgtggctatcttggtctccttagattctcagcacctcttcaattcagagggttgcctgtccctcctccttgtgccacagcctaggaactctcttaaagaagtgaggtggggcagctgtggggctcactttgtctctcgtctcccagggatcactgtccttcatggctgatgtccaatgtcttaaggactctggattttgtctgttttgttttttggttggctttgtttgtttcaaacaggagggtaaacccagttcctcactctcattgtgctcagtactggaagtctcgctctgttatattggatattagtatttgtagcagagccctggttccctggtacttggggagctcttgaaaggccagaaacagcatgctttctcacctttcccagggcttccgtttctggtgcacacaaagcattccatacacatttgttaaagttctttgttagacaaatagtgattcacaggctctatttgtaattttttcagtaagcatgtattagatatctgctgggagctagtagaaacaaaaagtgacatgtgacaaattcaattctgacaagaacaaccttaaacatttagaatataatttgagtaaatcagaattttaaaaatgtgtggcccttgaatatttgaaaccaacaagaatctattgcttattagtagaggatattttgttgaacaagtggagagagaggcattttcagtctaactggtgttggcttttagcagctgttggaaaccggttcatgattagccaggcagtggtgaaacaggctgtgcattctgaatgcctagattggtggcactcttcgagttagcatcttcttctttcttcttttttttgagatggactttcactcttgttgcccaggtaacaactccagtgcaatggtgccatctcggctcactgcaacctctgcctcccgggttcaagcgattctcctgcctcagcctcccaagtagctgggattacaggtgtgcgccaccatgcctgactaattttgtgtttttagtagagatggggtttcactatattggtcagactggtcttgaactcctgacctcaagtgatccacctgcctcgacctcccaaaatgctgggattacaggtgtgaaccactgctcccagccccttcttgattcttgtaaaggacattgggtgctgtacaccttgttatagatgttgataaaaattcttgtgagaatagtaacgttaaggtagttgtttggtcatttttgtctatcagtataagataattctaggactgatttgtggtaaatcacacattgctgtatcatagttgtgttcactgaacatattcaggggctttacagatgcagggctcttagctgctttgcgcacttctgaattcctgccctgagaacaggactggatacctagtagacgataggtatttgataacagtttaatgaattaatgagtgaatgaacagatacgtaggtatgtgaaagaatggttgtaatgtatgtaacttggatttcaagacttactctgttcaaataagaaatggaaaactttcctctgattttgctctactatttacactctttaaatggaagttatcttgtacctttgatttctgtctaggattcgtacaataatgggtcatctctgagtcacttacggtctcactgttctttccacagtgtgttgaggagatcctaggatacctgaaatcctgctttagtcgagaaccaatgatggcaactgtttgtgttcaacaagtaagagcttcattcttttcctattctgttaagactttcaggtatgacgacaaaatgctgctactccttaagcagcaggtgctggtggcgtaatcagctgggaggattgtggggtccagcatagcacttttcggctcattccatgattgagccaagaggccgaccttcccgtcattccccaggaggacgaggtctgtcattgtggagagcaaaggacatcagaagctcccctgcatcctcactcgttaacttccagtccctcggggtttttgtttagcgtgctcaatctcatttagaatcgcaaggaaacccaaaactcttatttaaggtacaaacagcacttcatacaatatctcgccgaggtaataatagtgattcacaggaagaatttcacattgtgaatctttgctaatgtatccagttatttacagatggatttgatatttgtgtgggagattcttaaagtgttgttcatgccacgttgtttgtgcttcaattttttcactatagttgttgaagactctctttgggacaaacttggcctcccagtttgacggcttatcatccaaccccagcaagtcacaaggccgagcacagcgccttggctcctccagtgtgaggccaggcttgtaccactactgcttcatggccccgtacacccacttcacccaggccctcgctgacgccagcctgaggaacatggtgcaggcggagcaggagcacgacacctcggggtaacagttgtggcaagaatgctgtcgttggtggaagcacaaaagagcaagcaggaaatactttgtaaaagaataaaaacgaaaaatgttagccaacatcttctaatagtctgctgtattcaaagaactctaggaaatatggttgatgcaaagatgatttaaggcatagcccggcctttcaagaagtgtgtggccagtgagtgagatgggcttgggacttacacatctcagaggtgggggtagaggaggaggaacactgagtgggctgagaagcagccagctttcattgccaaagtgtgtcagcaaaccagaaggcagttcataatgtccccacccgttcaaagcacaggccctgtagagtggtgtggcatgtgttggtggcacttttcaggcctgtaacaaggatgaaagaacagcttcattgcagcacagtagtgctggtattcagaggtatatgaaggtcatggaagcatcttggatatgttaccttgtgttttgtcaactttatgactagaaatctctttttacttaaatttatgtttgtgtctttaatgcctggaatacaggacttcttaaattgccataagtatcaacaggtatttgagttactaatctgtatagtagcaataatagaatcccttgtttttccttttataaatgtaatgattaaatagctacaattgaaacactagagtcaggagtcaaggaaaatacccatgttccaggctgtatgttagtgatgtactcactgtgtattccagtttcaggaataagtctgtttcaatgctttctgtaaccatttggggtattaataagcaagtgagtgtatgcatgtttgggttaatttcatatatgtgtcttagaaaggatatcattgatgtaaatattttcaaggcttatcctccaaaaaaatcctgtgatttcttctaaattactgatcttttaaatgaccttcacctttctctcaagtctcacttaagactgggctgagtagtcagtttcctgtagcagtaaaaagctcagacttgagtagccttccacaggtgacgagacttgatggctgtcaggcagctgtaaactgtaaatagagtgtcattatctcgagagggtgatgctgccacactgagtggcctttcaagttgtttctcagtctgacatgttctgatcgtgtgaatgtgaaattggtttgaacaggagtatatctgagtgcagaggagattatttaaagatattctcattgtctgcttcccttctattcccatttggcagatggtttgatgtcctccagaaagtgtctacccagttgaagacgaacctcacaagtgtcacaaagaaccgtgcagataaggtaaatggtgccgtttgtggcgtgtgaactcaggcgtgtcagtgctagagatgaaactggagctgagacttcccaggtattttgcttgaagcttttggttgaaggctcacttacggattctttctttctttcttttgtttttttatagaatgctattcataatcacattcgtttgtttgaacctcttgttataaaagctttaaaacagtacacgacaacaacatctgtgcagttacagaagcaggttttagatttgctggcgcagctggttcagttacgggttaattactgtcttctggattcagatcaggtttgtcgcttttaatctttcatccatcatacctgtacctaatttagtacaaattaccctgaaagacactgaaatctactttaaagaaatgtgaactgtgtttccccaccccccatcaattgctgctgcttatgtttttcatgcacttagctagtacaaggcccggggcatagccagcctcagcaagtcggcatccttgccccagctccctggactcaaggctaacctggggttggctgttagggatttccaaaggtttgtcccatccactcgcctcccctccaaaataagtttgaatttaaattgtgagatttaattaagatttattgtttggggaacatttttgcaaaatctagagagttagtttaaatggattatcaattatgactataattgatcatctgcagtttcaggctatctaacaggttagcttacctctttaaaaaggaatggaatttagccggacagtaactgagacccacgctcctggagtccacgtgggagccgcgtggctctgcacaaacaagcatttgcactcttcccctcttggctgcgttgccctcctcctgcagttgctgtgggcactagattctggctagtcatgtcccttcatgatgcacagtttcctcaagattcgtgccagttaaatcactgccttttcatagtcaaaatttaactgtcatctttgacccatgatcttgggctacttccttatgtggggtaggaatatttttgagatagaaatattacacttctctgtttccttctagacaaaaatctgttaattctgttagtaccgtgactcatctgaaagggtctgtttccctaggagaactgagggcacgtggtcaacactgatttcccaccatgggtattgaggtggggtctgcttttttttgttttgtctttttttttttgagacggagtcttgctctgtcgcccaggctggagtgcaatagtgccatctcagctcactgcaacctccacctcccgggttcacgccattctcctgcctcagcctcccaagtagctgggactacaggcacccaccacttcgcctggcttattttttgtagagaccgggtttcaccatgttagccaggatggtctctatctcctgacctcatgatccacctgcctcggcctcccaaagtgctaggattacaggcgtgagccaccgtgcccggcctggggtctgcttttaatgaaagaggcatctaggggtgggctttgccttggcttgatgctttgaacctttgttcacaaaacctatctgaagaaaatctgtctcagtgggccattgctctcctcaggaaacatgcattgggaacttcttttcgtttcctttgacactaggaggctgcctggggagaagccctggtctatggctatgggcaagcaggggctgagaggagcaggctctcagtggggcagggtaccccaagggaagccagaaccctgatttgttccattctagtgagaacaaagactacagtctaccttttcttcagaatttcccagttctaactgggcatggtggcacacctctgtagtcctagttactgaggaggctgaggcgggaggatcacttgagtccaggagtttgagtccagcctgcacaacatggcaaggcctgtctctaaaataatagtaataatcataatctctagttctagccgggcacagtggctcatgcctgtaatcccagcactttgagaggccgaggcaggtaaatcatttgagctcaggagtttgagaacagcctggccaacatgatgaaaccccatctttactaaaagtacaaaaatattagctgggtgtggtggcaggtgcctgtaatcccagttacttgggaggctgaggcaggagaatcacttgaacccgggagatggaggttgcagtcagctgagattgtgccactgtcctccagcctgggcgagacagagcgagactgtgtctcaaaataataataacaacctgtggttctgactcgtcatgggtaggaactgattttctcatgtggtagttacagactatggtctccttgggcctgtctttagtagggaaaaaaggcaactccccactctaacataaaatgggtggacttgaatgttttatcaaattctttctttagtcgttctactggagctttttcttcaatgtagaatattctgttgctttattatatttgtctgcaatctccatgtgatatttccatgttgagggaggacagccttgaggctcccccgtgctgcctgcggccctgcaggcatgtggaattcatctttggcctgtgctttcttctgggtcccggtgcccctgcccgcgaggctcatgtccagctgcccctttgtggtggtgtgaggtcattcctgctgtgagcgctctggtttcatgtttgttccgattgcctttcatcagccgatcccctttctcccagttcttaagattcaatacagtgacagttttatgaacaagaatagaactagaacagacaagccattgaactctatgctgataatgatttaccgagcacctgctgtatgtttgcattccgcgcagaggctctgagaaagccgggccatgtgctccatgctttatcggtggaagctcctcatcaggttgggaaagctgacagctgcgtagaataccagtgtgacacaaagctggctcccgtgcggcccttgcgtgttgcctctcagatggtgggaggaagaaggtcgactcctttggggatcttactaccaaaccagtttcagggaatctgctaccctgtctgccattaatgggaacagatgagtccccaaggtgtacttctgggtattgtctgatgtcgcttggaatttattacttgtttttccaatgaggtttcacctcagtgtgtagtaaagttgttgaggggattcctggaggtgttctacagttatctaggctgatttcagaatagagttatgcttatagtccaatttatcagctgtcaagaaattcatttaaaatttgtgcagataagcaggaggaaaagaaacctggtttttacgttttaatcctattattgatgtaaaattttactttccttcccgtaggtgtttattggctttgtattgaaacagttcgaatacattgaagtgggccagttcaggtaatagcattttgttattttagagttttttctccttcttgtgtacttacatgtaatttaggttattaagatgaatgtttaaactactgttaggcatttttgctgttttctttaaatggaaatctgattaacatgctgtgcatttttgcttctcttaaaaattaatgtatatctcaagacttgtttggaagtagttacatatctgaaaattccatatgttgtcagttttcattgcacatttcaaagcatttaattatgttgacagatggcggaatgaaatcttgtggtggagcactagtttttaaatcttcttagagaaagcagtttttatataaggttgtctttagtaattattatgcacttgtattctctgcagcttttttttgctagatgttgaggttttaatacttcttgctagtccattacaggtttataatgattgaaagttaaaattctttagtacctgaaatacttaataaatactgtagttaggaaaacttagtgcagaaggaaagtgttcccagattccctggggtctggaagcatagcgtttgttctaatcacgtgacacctccactgtgttttggggcaagttactttttctcttttgagtttcaatttctacaagagcaaaggggcagagagagctagggagattgtagctgctgtgcctctgtgccgtcaggtgccttctacctgctccctctgaacctttacacctgtcccggctctgcacaagggcacagatgggatgcactgtggcagggatgggcttagagtagatcactgacacctgttagcttcatgtgccctcatgaattattttatgttgcttatattgatatgtatcttaattttaaaagaaaggtctaaatggatgtttttgtttctagggaatcagaggcaatcattccaaacatctttttcttcttggtattactgtcttatgaacgctatcattcaaaacagatcattggaattcctaaaatcattcagctctgtgatggcatcatggccagtggaaggaaggctgtgacacacggtaatgggacacatctttcactgtcgtcttcagtgtcacgatgtgcttggcagtgttcgttttcttttttttgttgttgttgtttttttttttttgagacggagtctcgctgtgtctcccaggctggagtgcagtggcgtgatctcggctcactgcaagctccgcctcccgggttcacgccattctcccgcctcagcctcccaagtagctgagactacaggcgcccgccaccacgcccggctagttttttgtatttttagtagagacggggtttcaccatgttagccaggatagtctcgatctcctgacctcgtgatccacccgcctcggcctcccaaagtgctgggattacaggcttgagccaccgcgcccggccggcagtgttcgttttcatacacccactttcaactttgtcagtggcggccgtgtgcgtctcaggctctgcatatgtgtctgtgtgtctgtgtatgtgaatgtactggttagagacgtttcaaaagagaagagagcatattctttactctcagcaatttgtaatcttctcagggaaaaaaagttcaagaaacagtaagatagcctaaggtacagatagattctgaatataaagttcctgttcattcacacgaaacactaaaagttcttcacctgatcttagcccaaaggccgagaagcgatgaaacactaaaaattcttcagtcgaacttgctgtgaattaaattttgatctctcatccaggtggtattggagatacagtttgacttgggttcagggctttctgttttgcctgatgattattttgctggagcttaaataaagacagggctccaggagatggccagctgtgcaagcccccagcctgtggaaggagctagcctggttttatgaatgagctgtaaatctttctttgagctttttgaactggtcttccagcattgccctattgacccctccctgactcctttgctggaatccgtaggcttttgaactttgacagggacacatcctaagacccttgcaaacccctagatgtgagaatggcactactacatagagtcttttccactcagcgtgtgtgcagaagaacatcaaccatgctgtgtggcgaggcagggccttggctgacctctcagtcaaggccttagctttacagagctaagccagttagtctttgccatggcttcacaatggcttcaggttcacactgccaaagtatagattattaaaggcataggtgtttggtttcctgcacttggagggtctttggacagaaaatcagtaggcagccaaagccagtactttgcgctgggaagcttggtcgtctgtgagagggtcagagaggatacccatgtgtgcgcaccaccgaagggtcagtgagtctcagggctctgcgtgcatgtctcagggctggagagagtgtgtcactgagaggtcagagtgtttgtgcgtgtgtgtcaaagagggttgcagtgtgcccttcactgaggggtcagagggtgcctcacgtgtgtgtatgtgtgtgtgtcactgggtcagtgagtgttcttgtgtgtgcatgtcactgagaggtcagagggtgcctttgtgtgtgtgtgctcatgtgtgtgtgcgtgtcactgaggggtcagtgttcctgtgtgcacatgacattgagggtcagagtgtgcctctgtgtgcgtgtgctcgtgtgtgcatgcgtgacacctccactgtgttttggggcaagttactttttctctttctcttttacttggtcatctgtgagagggtcagagaggatatggtcctgtgtgcgcatgacactggggcagagtgtgcctctgtgtgtgtgtgtgctcctgtgtgtgtacgtgtcactgaggggtcagtgttcctgtgtgcgcgtgacactgaggggcagagtgtgcctctgtgtgtgtgtgtgtgctcctgtgtgtgtacgtgtcactgaggggtcagtgttcctgtgtgcgcgtgacactgaggggcagagtgtacccgtgtgccaatgaaaggcatttcttatttttttttatatgtggtcacagtagaccaattaatttattttgactcctgttttagaccaaaataagacctgggggaaagtcccttatctatctaatgagagagtgagtttacttaaaaaagcataataatccagtggctttgactaaatgtattacgtggaagtttttattgtcttttcagatgaatcaaatagattattctcgagaccaggaatggtgctgttttggttatttgggaagttttatcattttcaaattgacctttgaatttgagtcaccttttttcagaagtggtgttaaattacaggagccctaggttttttttccttttttagaagccatcacaaaatgatcggtgttcagaggaaaagctttgatcttccacaatggtataatgattgataaccttaattcatctcttaccataaaccaagtatgtgtaagggttttctttatttcttgatatcattttgtagatgttgagagcagttttccaaatgtaatttccatgaaatgcctgatgagggtacccttttgtccccacagccataccggctctgcagcccatagtccatgacctttttgtattaagaggaacaaataaagctgatgcaggaaaagagcttgaaacccaaaaagaagtggtggtatcaatgttactgagactcatccagtaccatcaggtaagaggaatgtgtgttggaactgtcgtggatactttattgacccgtacagatggaaggaagtgccatgtggtaacactcactgttaaccgtgctactttgaactaggtttgagctttctgaggcctggggagatgctggggcagcggcgggtgcagggggaggtgggggcgggggacaggcgtggtggcaggaggtatcattggtgtttatccttccttttttttttttttttttgagatggagtctcactccgttgcccaggctggagtgcggtggcatgatcttggctcactgtaagctccatctcccgggtttaagcgattctcctgcctccacctcccgagtagctgggattacagacatgcaccaccatgcccagctaatttttttttttttttttttgtatttttagtagagatggggtttcaccatgatggccaagctggtttcaaactcctgacctcaagtgatccgcctgcctcggcctcccaaagtgctgggattacaggcgtgagccaccgcgcccggcctggtgtttatctttaaagtgggtacagccacaggggttcacctgactcctggtctgagagtcacaagatcgttcaagatagtgaggccctcttttccaaaacaaggaccaaaaatcagttgacagtgttggtcaagatggtagaaacctaaaatgatagaaatctcaactctgaaataaaaactttatttgcatatttatttaccactattttgacatagggctaaggtctttttctttgagctagtttctggttttgttttcttaaggtggcataagaattcaaagacattttgaggaaaactgagtgtagaaatctctcttttttaatgacttctcttttctttcagcttgtactgttgtgtagccctcgcttattttgtcaattctttttagctgtttgtctttgaatctttatgaagccatagcttttctcataagaagcagcactttctttgttcattcatattttaattaactcctgtagtatttaaatacttaatgcctaattaaatcacataattgcaatgcaaaagtacatgtatcataaagaggtctgaaaatgagcaactggcaagcaggtggctgcaggcagagctggctgggtgggtgggtgtcctggagaagagctcatcagctgcatgttcagtgagctctggatatctctgtgtaaaaatgatcactaataaacttgtgctcaactgtgcacacttccggaaaggagatgctgttcagtagattgcctctgcagagaacacagaattgaagggaatttccacaaaggcggtgagccgcctgcagaatagtttagtcaaggctgtgtttgaattttgccaaagattaatatacatttatttttttcatgctgtgccttttctctgattgtgaaatattataaattctatccaaataacaatgatggcaagtcctcctgagcaaagtgtgcagcttgcatgtgtcctagaggaactcgtgtttcgttctgattcccctgcatttctcatgtcatagagtggggattgcatccgtgtccccctgtcctcgtggggatcacatctgtttggatcctagagtcttcaagctgagctgggacaagtgtaacagatggacacatgggggtggaaaggcgcctctaggcagcagactctctaattgtgcacactcttataggtgttggagatgttcattctcgtcctgcagcagtgccacaaggagaatgaagacaagtggaagcgactgtctcgacagatagctgacatcatcctcccaatgttagccaaacagcaggtttgtccccgcagccttggctcgttgttgcatagtgatggtagcttaaggtccttgtgaaaggtgggtggctggaatcagctcttccttcaatcctaatctgtgctttgatagcagttctccatgctagtcatggggcaactgacttcatttcttctcataatgccatctcaggttggtattgcccacctcctttacggggggaactcatgactcagagaggttatggaggcgatcaggcagcacacagctttagagtgctggggtgagggcgggccaagtctgactctaaagcccgaacccttacctcctatactgcctcctgcattctggtcaacgcagtgttttatttggtggttacatttttgtttttgttaccttactacttgtaatttagcagttttcctttcctttcctttcccttcctttcctttttccttctttctttcctttctgacagggtctcgctctgtcactcaggctagagtgcagtcgtgtaatctcactgcaacttccgcctcccaggttcaagcaattctcccacctcagtctcccgagtagcaaggaccacaggtgtgcaccactacacctggctagttttttgtatttttagtagaggcgaggtcttgctgtgttgcccaggctggttttagactcctgggtgcaagtgatccaccaaccttggcctcccaaagtgctggcattacaggtgtgagccacctcacctggcctattcatcactaatcagaatttctatgatcaaatgacatgaattgttgtttccacaaatgcagtggaaggaaatggcctggcagtaccaattttggaagcaacaggcccccagtcaggcacaggacactgtgcccccagtgtagcagcatctctatctcacagagaaggtggtgcgtcctcctcaaggcagctccgccagaaaatctcatgagcggcctggcacggcttgaggttgccttttaaatggactcagcaaatacatgtttgttcatcttgattatacacaataaacaactactctgtatagtacaagtagtccgtggttttttgcatttgatttaaaccagagacatgtgatattgatggttactgccttcatgactgcacccccatcctgatttcataatagaatgttatcctgagaccagttagacaatggaacagggatcttggcttctggtgagactgacagcagttttagcgtggtcagggtctccctgcccacagatggtgttagaatggtgctctggaagctttattccattatcttctgtgcataatctgagtagagtggagattgaaggcctgaatgcatagtaaatatctgacttaatttctgccgcaatggaaattgtgcgataaaacatttatgaaatgcgtagcacagccccggccaggtagctcagcacaggagcctgttgcattcagaagtagtgctagatactatcctgttactggcagtacatacatcagtgatcagagcagattcaagaaagaccccctgccttcttggagtgaaggttttgttgggatggggtgaggggacagacaatagaaaaaccagtgagtgaagtctctaccatggcagctgatcagggacgctgtacagaagaatcccggagggaagagagttaggtggtttcggcggcggagtggcattgttcagttggtgatgagaaacgttgtggtgatctggtgacatttgagtgaatttgcagaaaggaaagatacaagcctaggagatacctgggggaggagcattccaagaagagcaaacagctgcaaaggccctggggggaacgtgctgttagggtaaaagcaatgggggtggaggagtggggcagctatgcggagggaagggagcgaggcctggtggggtgaggccagcatggaggagcctgagaggnnnnnnnnnnnnnnnnnnnnctcccaaagtgctgggattacaggtgtgagccactgcaccccggcctgttttttttagagacggagtcttgctctgtcgcccaggctggagtatagtggtgcgatctcggctcactgcagcctccgcctcccggattcaagcgattctcctgcctcagcctcctgagtagctgggactacaggcgtgtgccactgtgcctggctaattttttgtagagacggagtttcaccgtgttagccaggatggtctcaatctcctgaccttgtgatccgcccgtctcagcctcccaaagtttacaggtggattacaggtggctcccacaccgagccaagagtttgcatttttaacaaattcccaggtgatactaatgctgcttttctgggaccacactttgagactcagtgatagaaagatttattggtaggatagtaaaataggagtaattttttttttccacaaaattggcaattgggggaaatttaatcttccttttttctttagctatgacttatttattctgtttattttaggcatctgtgagcactgttcaactgtggatatcaggaattctggccattttgagggttctgatttcccagtcaactgaagatattgttctttctcgtattcaggagctctctttctctccatatttaatctcctgtccagtaattaataggctaagagatggggacagtaattcagcactagaagaacacagtgaagggaaacaaataaagaatttgccagaagaaacattttcaaggtatgctttctatctgagcctgtaactaacccatgccttttgggaagtcacttggtatttcatgatcagttaagtctggaataacacctggtctcgcttcagttctgagctgggtaaagaagtctgtatcagtgtaattttctaatccatcctggcttatctgtggctcctgtttcatacctctcttgaggttctgtcatgttctgtctcttgtcctcagcagagatgctacagcagtggcttgctcaggtaggacagggcagtggggtggctgtcctgggggcaggcagtaggcgtgcattgccttcagggaagttaaaacccaagagaagccacagaaagtgaatcttatattctcaccatgtgccggcagttttacacgctgtcagtaataaaatacttctccctgcaaggcagactgcctccagtaaatacctgtagtatcaaatcctgtcttccctcataaattgttgggaagctccctcaggacagtggtcaggcactcgtaaatgcttgctgcctagatgggtccctctccacctctgctggattctgagcattcactgagttagagctgctgctgcaaatgtgctacttctgcctgagtggctgtgacttcatgcagccgtcatttggtttgtcgtcagtgaagatgccctgtgttgtcgatggagataagcccagtaagcctgctgggcacctttttgtttgcgggttcagcaggcagcccgtggctttccctctgttgcattgaagcagctggctaaaactgatggtacattaaattcctatgacagatgatcagcttgtatttgtgtaatggtgtacagtttacaaagcttaaaaaaatactacctgccatttcatcctcagcgaggaaggtgatacacagagaggaaaagtgactgtatccaaggcgatggtgttacgcgtttcactttaacggtttaatgtactttacttctatttttactttatatttaccacatatattttcatatatacttggcataagtgctttatagtagtcacctaattcactgtcaccctttttgtttcttggaaggtttctattacaactggtgggtattcttttagaagacattgttacaaaacagctgaaggtggaaatgagtgagcagcaacatactttctattgccaagaactaggcactctgctaatgtgtctgatccacatcttcaagtctggtaggtaaatcacattagtcttcctcgagtatctcaattccccattctgcactgtacgctcttagagtgtaggagctatgctgcccggtagaaactctgtcttgcccagagtgccagttgaaaatgtttgttgctataagagtcagcctgatccatatgacccagcagttctactcttgggtatgtacccaaaagaatggaacgcagggtggtgaaaagatgtttgcatgccagcgttcatagcagcgttattcacagcagctaaaatgtggaagcaactgaagtgtccattgatggacgaatggataagcaaaatctggtgtatacttagagtggaatattattgaaccttaatattcaataaccttaaaggacattctgacacgtgctacaacatgggtgacccctaaggacattatgctaaatgaaataagccagtcacaaaaggacaaatactatgtgattcctcttatatgagggacctggagtacttaattcatagatacggacagtagagtggtggttgccaggggctgcgggggaggggagttgtttttacaagatgaaaagagttattctagaaacgaatggtggggatggttgtataacagtgtgaatgtatttaatgctactgaactctacagttaaaaatagttaagatgagccaggtgtaatggctcatgcctgtaatccaagcactttgagaggccaaggcaggaggactgcttgagccaaggagtttgagaccagcctcagcaacatggcaagaccccatctgtacaaacagactagccagggatagtggtgtgcctgtggtcccaactactcaggacactgaggctggtggaccgcttgagctcaggaggtcaaggctctagtgaagtatgttcatgcctctgcactccagcctcgactacagagtaagaccctgcctcaaaaaaacaaagcaagacaagacccaaaaatggttaagacgggccaatcacactggcttactcctgtaatcccaacacttcggggggtcaaggtggaaggatcacttgaagccaggagcttgaaaccagcctgagcaacatagtgagacccctatctctacaaagaaaataaaaaactagctaggtatggtaggcacatgcctgtagtcccagctacttgggaggccgaggcgggatgatcgcttgagcttgagaccagcctggaaaacataggaagagactccatctccacaaaaataaaaaaaataaaaaaattatccaggggtagtgacgtgagcctgagcccaggaggtcaagctgtagtgagccacgatcgtgccactgcactccaacctgggcgagagatcgagaccatgtctctaaagaaagaaaattacaaggacagtgaacccaagaaagtcagttgtgcagcaagcatagaaagcaaccagtccaaattaggacagtgtgttttccaagaagaacgatcatttgtcatgagaatgctttgctttaaataaatgagtaaataggtagaagactagttctaggggataggcacgtctttcttctctcaacaagaaaaaagaaaggcaattctaatctctaggaaaagcaaatagcattaagtcatggtccaaatatgaggcaaaccaaaatatggcttgatttttcagcagttgatctgttggaagcccttgatattaaaaaggttctcctttaagcagtttaggggtcatgatcaaagacccatagaaagagatgccatccttttaggatccttggctctcttgggaactgtattcacgtagtcataatgtaagtattgcttgagctttcatttttggaatcaatatgtgactgaaacactgaagacttactgacttaattatggtttcagaacagaatgaaaatgtcttcagttctgatgaatataaaaggaaaactaaccaagttaatttggcaagtagatggtagagatggggtgggaatggaaggggcactaaaatccttacctagcattgttggagttacatgattacatcatctgaagttgacagaccaaaatatagaggcttcaaaggtatccagatagagctaaacatgtaactcagattgttaggaggtagtataaatgagccaaatctcctctttattaccgtagagttaatgggtaatgtctaaagttgtctgaagtctgtaaatcatgacaaattatgatgtggtgattgtattcaacagtctttcagttgcagggataaaaccccaatttaaactagagtaagagaaagaatttgttggtttgagctcctggaaagtgcaggcaagggtagttggtaggactgcatctagtgttataattctatggtctgcattgtatatttatgcatatcagctctgctttcttctcttaatttgtatacttttaaaattttattttaaagatagggtctcactttgtcggctacgctgaagtgcagtggtgtgaagtgcagtgcgaggctcgctctagcctcgaactcctgggctctagagttcttcctgcctcagccttctaaggagctgagacaataggcattcaccaccatggctggataggttttaaaattcttttgtagaaatggaggccttgttatgttgcccaggctggtctttaactcctagcttcaggcgatcctcctgcctctgcttcccaaaatgctgaggttataggtgtgagccaccgcgcccagtctcatctctgcttcctgtcttagcccctcaagtaggcatgtgattggccttgcataagtcatatgggtgaccataaaccgctgaatgctctggtccacctgggccaaatgggagactggacagcattccattgacgaggaggtggggcttgtctccgggagtaagggagaggagcgcatgcagtaactgatggtctgctgcacgggatagcggcgcatcagttagaattttgaaggtaactaccagaactgaaaacagaaaagataacaagtagttgccttaaaaagggatggggcagggtgcttttgtgatcagaaactcctttctcttattggatttttgtacacattttgcggacatacccttagagtaaagataattagcattttcagccttggtccatttgaggagtggcccgcctccctgctagcaggctctgggtctgctaggttcagttgagcatcctggctcttgcctgcatggaacttacagtcagtgcgtcagtatcacaagtcttaatatttcctatgaaggaaaacaatagtgcagtgacagacaaaatgggtgggcgggcagaggcaggatttccgagggggagaagtagctagctttttgcagagaaatgttccggcacccgagagagcagctgagagtgcaggcaggcaggaggcgagtggggcctggccgcacagcgtcacagagtcccagagaaaggggcctcttcatggccactgcattcagctgctgtcaccctccacacaagccatggccaaaatttaattttgataatggactctagtttttgagccttacttgctattattgaaagaattttcttgtttctttttaaagatcttcagattatgcttcactgaccactgtaataagtttaaagttgagaaaatatgccttgttaatgaatgataggtcaattttagtatattggtcattttaatattttgccaccagttggtttgaatctgatgccaggaggagacagcctcatttctttttttttttttgagacggagtctcgctctgccgcccaggctggagtgcaggggccggatctcagctcactgcaagctccgcctcccgggttcacgccgttctcctgcctcagccgcccgagtagatgggactgcaggtgcccaccatctcgcccggctagttttttgtattttttcagtagagacggggtttcaccgtgttcgccaggatggtctcgatctcctgacctcgtgatgcgcccgtctcggcctcccaaagtgctgggattacagacttgagctaccgcgcccggccgagacagcctcatttctaaggactagtcttgcctttgtgggataagggtggtgtgttctgtgtctttctacatgtccgagcgatctctgcagctcaaaggtgttcactgtcttattgtgctgatttcctcttcttccatctcaaaattgaggcaaaatactttcactattgaagtgttgtccagtagaacttccagcagagacgggatgtctgcactgtctaatttagttgcctttagccacgtgtggtgttccatacctgaaatgtggctggtctgattgggtagcttaatttataattttatttaattttaattaagtttgaacagctctgtgtggatagtggctcctgtatgaaactgcaggtctgttgagaagcatctttactggagagagtggagggcttggagggggcacatgggtttcctgctgctatctttgaccttatttaattggcccaacatttgcaagtaagttgtctgtgcgtgtatatataaatgtctgtttctgtcttcttgtttcgtttgactgcatttatttgaaagacactaggtggcagaattactgtatttggttggtttaaagataagagttgaagtaatccgtcttgtgtttttatatcggtaaggtgtgtttagcatgtaaaattggtaattcgtattcacgtactgcttaaacaaaggctaagaattccacccatacactgaaaatggagacctttgaatttgtccatttcaggcattacttcttaaacaatacctggttcaggaactagtcagaatggcacccttgacttttagtttcctgcttttccttttgttgggggaggagggtatttagctcaaaggtgtgtgcctatttcagattccatctaggagaagcagaatagccaagacagatacctgtcctcctgtttacaacatttggggtaaccagcatccctctcctttggtccaagatagacgggtttagaaacagatgatggtaccagaggccccgggggtggaagcatcagctttgtttgttgtccatgtggctggattagagctgtctggctttgtagcctcaacacggccgtccagctttgctcagtatgattttcaaggacacatcttgtgcccttccctgcctgccatccagaccatacccagtcagggtggcaggaactgctgccccttcctccctgagtcctggtcgtgggtggtggagaggtaccatgaccctcacggaggcctgctcacccttcctctgcggcagaggcgatggctgcacgacagctctttccctgtcctttccaaagcgtccatggttccacttgatggggcaaagcaggaatactggaagagaaagtggtcctttctatagtaataaagttgacattgattcaagttcacccttggggaaaggacagggccactaacaattataatgctggaagcagtggaattttctcatgggtatatagtaggtttaattttaattatcccagttaattcttagaacagctctgtgaagtatttccccctttctgcttgagttctaaaagatcctatgccaaaaccaagaatgaaaacccaagcattctttcttgctcatcgatctttctctcatcgggccacttcttgggttgttagtggtgaatgtagccgctggcaattgcagaatacccaccatgggccccagtcactgtgtggcgtggattagaggtggttctctccatgtcatagccgaacaagcccagcccagagaggtttctgccctaggagctcttgatggtggaattgggatgcgatcccacatcctgcctgtgttttgaaagcagcattcttcatttccagttcctgcttccgttgttccttttagtatttctttgtttaactcacgaaatcaggacttggggagctgctgcgtgcagctgtagctgtttctctgggtgcagcctgcatccaccttcctgcccccctccttactgccatcgtggtctctgggcacttggtccctttctcttcccccgagtccctttggctcccctgtgccacccttgtgatccacaggctctgccttctttctgtctgagactgctgctcatcactacccgggaccttaggaagggaggttcctccgagaagcatcttctaatctcagccacgttctcaatgccgctgttggctttgttaaataatggtagctactgtaacaaataaaccaacatttccatggcttcacaccagagaaggttgtttcttggttttatgacaatgtgttgagggtgtttctggttcacggatggttttcctccatgtgggaattcggggacccaggctcctttccttcttttggttctcttctctgggcctccacatcctctgtgtctagttggggacaaggagagggaaggtagagaagaaggctctgtggccttggacaagtgacatgcatgcctttgctggtgttctctgctggtggtgggtcacagccccaccccgtacgaggggactgggagacgtcgtcctgctgcctcccagcagcaagcagcactgtggtctctgatgtgttttctatgaggataaaaacaggcgattccaggatgagtaaagtcagggaaacccttggaaggaggtgaccaggcaggtgtcaccatgggattagtggtggcttcagaatgagccgccaagagtgcagtgccttctaaagcttttgctattctgatatgcccacaccatgcccagcaggtgtctgccttgctctccgcagagagagtgatgaatccttctcgtgaacctctgtcccgttcttcctccctccacctggaagggaccctgggttccttgaaacatcccggtggaacaggggaccttctgtcctgtccctaagctcagcctcatcctcctgccagcttcccaacccctcttatgtctgcttcctcacgccacatccttctggattctctggaattgaattttgcctttgatgcttatttaaaaatatccattgcaggccaggtatggtggctcacacctgtaatcctgtgcactttgggaagccaaggcgggcagattgcttgaacccaggagtctgagattagcctgagcaacatggtgaaatcctgtttatagagaatacaaacagggcatggtggcgcacacctatactcccagctagacaggatcgactgagccctggaggccctggaggccgaagctgcagtgggctgtgatcgtgccactgtattcccgtctgggcaacagagtgagaccctgtctttaaaaaaaaaaaaaaatccattgcatacttcaccacagtgaaacgtgtgtcttatctttcctttccggcctgtagctgctcttttgcacttatagccgcactaagtcaaccttaaattaaaagcaaaccagcacttcctgtgctcttctgcttccttcatgagggtccctccctctgtgtacgctccattctcattgccccggtggtttgtttccctcttggttctcaagctgtggcagcctgcctcttatcatctttactgaaaagtcctttgcagaggctgcctgtgttctttctttctcggtccctctcatcctgggccccccagcttgatgctgtggggctgccctctcctcactcagtagcttgcagggtcttctctgtctagccacttaattggttgtgttccccgagttgctgtccgtggtctctcgtcactgttttctctgtgtctctgcctctctcctcggccttggtaggtctctcccctttgtgaccctggctgttgctctcgtggacaactttctcttgctggtccgcgtagtcctggcatccagcttctcaacatgggacttgtcctgccagtacctcagacttacgctgaaaattgaactagcaccactgtcactctccaggacctcttcttgttaattaggtcattagggatgttcgaaatcccagcatcattgtccattcctcctcctgccagcccagggaccctgaccttacctcctcctctccatctaccgggaggtggctctcagagtccgtctcatcttccacccgaacttccctacagactccccgctgccgccccaggggctgagcacttcctccgtgcctcgtgcagcgctgagccctttacctgggttctcctgtttgctccttattgcaaccctgtggacagatactgctcttaattccatcttaaacctgaggaagctgaggccccaggtaaggtgcatccaaggtcactcaggtagtaaactgtagagccacgatccgaaccaggcagtctgattcggagcctgtgttgacactcagccacctagaacacagctcagattgtgggtttctattacgtgttcaaaaccgccacatcccgggtctgtccctgcacgtgccctgtggcctggctgcatcttcttgaaggcagcgcatgcgtcttcactcaaggggcccatgcaggaaagagggccccacagaaggacgaggccagtgcagaatgggctggaggggacgatgctgactgtgaagcaagtgtagagaaatcccaggaaacctggaggaaccagagacagggcattagaactcatcgttgtgacctggtctgtattctctgagtgtgctgctgcttttagctcgcttccttagtctcaggttgtagtttaaggcattgtggagccctaaaaagcctctactctgtttttgcctgtttcgggaccctttcacttcggggatgtgttgaattttttgtttttgttttttaattttttgagatagagtcttgctccattgcctaggctggagtgcaatggcacaatcttggcccactgcagcccctgcctcctgggttcaagcgattcttgtgcctctgcctcccaagtacctgggattacaggcgcccgccaccacgcctgaccaatttttatatttttagtggagacagagttttgccatgttggccaagctggtctcgaactcctgacctcaagtgatccacccacctcggcctcccaaagtgctgggattataggcatgagccaccatgcccggcctgaaatttaatcagaaataaaattttgaccccaacaatgatgctaggaggcccagatctgggggagagggcaaccttggccagatgggcctgtctctgtttcccaagtcttgctgcctctccctgctgtgctttgcagcctgtgcatgtctctgtgcctctgatcttgttcatccagaggagaggatagaatcaagtcatgattcctggagccctgagaagaatgctgtggagaaacttgcaggtagactctaactgagtgtgtggctgaggtgccagcattgtgtgtggggaggctgaccgcttggcctgcccaggcccaggatgctccatggccgggcacagaggcaacttggctgtcaggtgtcaggagcctgcagagagcacacagcctggaccgcagggcgctgcccatgttcttccagcacctgtcctgcttgctcacctggcctcttacagcatttctgtccctcagttcttagcaagcccaggagctgttcaggttggcaggtgccgagtgctgttcctgcctgtgtagctgtggctcagtcctgtggggggccccgctgtggcctgagtgcagtgattcgaggtgccgagtgttccctgactcgttctgcaggagctgtgttcagactttcacagctcttggcttggagcttctggagggcttggcattgccaaccagtgcaggggtggacagtgggagaggaggaatgctagctttcttgaccagtccattaaataaatgggatattggccgggcacggtggctcacgcctgaatcccagcactttgggaggctgaggcgggtggatcacgaagtcaggagttcgagaccagcctggccaacatggggaaaccccctctattctaaaaatacaaaaattagctgggcgtggtggcagacacctgtaatcctagctactcgggagactgaggcaggagaataggttgaaaccagaaggcggaggttgcagtgagccaagatcatgccactgtactcccacctgggcaacaagagtgaaactccatctcacaaaaaaaaaagcagaatgtctgtttctgcttagaaaaatcagaattttctaaatgccaggtgctttgaatatgtaagtatgggaaacaactcagcctgtttcatttttatgtaaaatctccacgtagccatgtggcactggaccgagatgaaagcaaagacatttctccttctgaactttgtttctaggaatgttccggagaatcacagcagctgccactagactgttccgcagtgatggctgtggcggcagtttctacaccctggacagcttgaatttgcgggctcgttccatgatcaccacccacccggccctggtgctgctctggtgtcagatcctgctgcttgtcaaccacaccgactaccgctggtgggcagaagtgcagcagaccccgaagtaggttcataatgcccacagcccagggcgctggcccagcactctgtcctgagactcccagtaacctgagattgggccaccgttacagcattttcattttccattttttgtgagggcttgtaaaatttctgctgcatattaatattcctttcatggacagcatattgtagagacaaacatgcggtccagccaaaggcattcagaatagcaattgctttctaaatgtgattttctttggcaagttctttgacaccattccatcttgtggattatgcttgtcatgctgtgtggctcctactaagttctagtccttcagttggttccatagccagacatgttgcaatgtcttaacttcattataaattaaatgtggttctggttattcttagataatggagtaacgatttagcaaatttcaaaacctcttggaaatattatttgaccattcaaaaagacttactaagtctctcattatgggtggccctctttttgtaaaaggttttcaggcttaagctccatttctaggtgctccaacactctgttatttgtatacacgtggaaataaaagctgtgacatccccgccctagctgaatcctcagcacagtgtttctggaaggctcaagatcccacactggggaaaagaagttccagagagaaaagagggcaggtgctgccgtgcctctctgctcagtatggatactgggccatgtgcggccagggcttgcagtagggccagttcatggcactcagctggaaagtccactgttggcgggcattcgtaaccatccactctgtgccgtatgtagtggggtgtggcatccaagtatttgaaatcagccgcgtgcagagaaatcagccgcggatgcagcagatcactctttttctgacaggcctgctcactctgatgttatatcagaaagctctgaatctgggaattgtgttccctgaattggaataacagaaatgcttagatgatcagtgtttaaaagaaataaaccaaaggtaaatttagtttggaattcagcaagcgtcttcattcagccctctgagggcaaactacagcttttcataaatgtaggtaaattctctgtttcttgaccccttctgacccagttttcctttataaccttctgtattgttccattatcctgaaataacattaatagattaggctgggtgtggtggctcatgcctataatcccagcaccttgggaggccaaggcgggaggatcacctgaggccaggacttcgagaccagcccagcctggccaacatggtgaaaccctgtctctactgaaaataacaaaaattagccaagcgtggtgacaggtgcctgtagtcccagctactcagaaggctgaggcaggagaattgcttgaacccaggaggcaaaggttgcagcgagctgagatcacgccactgcactctaggctgggtgacagagtgagactccatctcaaaaaaaaaaaaaaaaattaatggatcaatggatttttaacctaatagttaaattaaaaaaatatcattctttaatggtaatgtaaaggtaaaattaagagaagataatatgtaacaagcattttagtatgtgagtgtccaaggtctccctgtggtggaaggaaaaaataaatccccataagtgtccacgatgctcatagagagcagagctgttccggtttaaaccgctgctcttaggactgtgtttttccagctatgggtggtgggggatgagtacctttttatttccatgagatgagaaaaatgaattactagaagtatgaagcacaaaacacagctgctctttttttatctggactcagcagctataaaattgctctatccagttgcagaagttcctgctgcttacccttgatgccccctcggttagtgtgcatctcctttcaggctggctcccagatgggagctggctccaggcgacactgggtgctctgctccaggaggtccttgtgtgggccctaccccggcctagcccctctcttatggactctgtcaccatgggtttgattcactcaatctgtcttaccttttggtgagctgttagagtcctgcctatacttcagcacttgtgggtgtgttgtggtacacatgacatgttggtcacttcccagctcatcttgttctgagtcaccctggatttggtacgttcattcgccactagtagctggcggtatatggcctgcgatttggaggacttgtgctgctacaaattggggctgaatttgagttgacactggcccttctttatgtctactgctaatatttgaattgcaaatgctgcctcttctctttcagaggctcattaccctatagctgtattattgcaaagtacataattacagcttgagtgtaagtcacgctgggctggcaggacagccaactgagaaagggcaagtttcctgttagttttcacattgacacataatttacaatacagtagaatgtacttttgtatcaactgtagtcagtaacagccccctcccccaaccacataagatatagagcagtgctgtcgcttcacatagttccctcttcctctgccatgtcccgccctccccaggtctaaccaccaatccgtgctctattcagcccattgcagagggtcatagaaatagaatctacaggctgggtgtggtggctcatgcctgtaatcccagtgctttgagaggctgaagtggaaggatcacttgaggctaggagttcgagactagcctgggctacctagcaagaccccatctccagaaaaaaaaaatttgaaaattacaagcatgtccctgtagttccagctgcttgggaagctgaggcgggaggatctcttgttgaggttacagtgagctatgatcgtgccactgtgctccagcctgggtgacacagcaagaccttgtctttgggaaaaaaattaagaaagagatggaaccacacagtgtgcagccttttgagtctggccccttgcagtgagcggtgtctaccgtcatgcgttgcacacgtgttggtggctggcttcttgtgactgctgagcattatatggctgggctgtagattgctttcacttcaccagttgggaaacagagaaaaggcagtttttaaaaagtttaaatctgtagaattttggtttttaccagttctcttctaaatcctgagggattacaggaaaagttgttgtatttcagaatattcttagcttgatgtgacctctctccctgttaaggccctttgctgcaatgggaaggacgtcgtcctcggtcagaccctgaaggtcagaggggcactttgggagtgtgtcaacattttaactgtatggactagagccaagagtctcaagatttataattcccacctattcaaaaagaaaaaataataataataaagtgagaagaagtcaatgtaaagtgaaataacctgtgttggtggggaagaagtgtttttaaacagaatttccataatgtataccctgaacgtgtttagagtggtgatgtttcattgggaaacgaacagtaaaacatgaaagcagggagattttctttctggcagttggcaactttcatggcagatggggaatttgaaaagcaattgctcaattatcaaacatagccagtgtgagttctgaaataaaggtgctgattgaatgtgcagctttatggtggattttgtcattcaggcaagcattttaattttctgcctgttaaattctgttttctttagtttttcatatgtggtttattgtagcttgggaatagataactgagagtatatattacacatacaacattctgatatggcaatatttaaaccaacttgtctgttttagaactagaattaaacataatcatcttcagtattttgcaaataagctcactgccatccagaaacattgtcaatgcatctgttgctccttctagaagacacagtctgtccagcacaaagttacttagtccccagatgtctggagaagaggaggattctgacttggcagccaaacttggaatgtgcaatagagaaatagtacgaagaggggctctcattctcttctgtgattatgtcgtaagtttgaaatgcctgtaaacggggttgagggaggtggggaccgggagaacatcctgagtagatgacacttgcctggaccctctggaacccagactgcccagtgtcctgccagctccatcaaaactaaatctggaatgaatgtttacttctgctctgacatataattggagaccgggcctggccttccagtcactggattctaagctggactgtgagagttgatgcagctgactcatttatcaaatgcccagctattggcttcacgcctacacgatgctgggcatatttgttaattcaagggaagcaatggaataataataactaatgatttgaaaaacaagataagtgcattgactatagtggggttctgattttaaattttttaaaaaagtaataccaggagcagtggcttacgcctaaattctagcaactcgagaggctgaggtggaaagatcacttgagcccaggagtttgagacaagcctgggctacggtgtaagacccccatctctaaaaaaataaaaaatgaaaaattatccaagtgtggtggctcgtgcctgcaatcacagcttcttgagaagctgaggccagaggatggctagagcgtgggagttcgagaccagcctggcaacacagagaaaccctgcccctaccgaaagaaagaaaaattagcctgatggtggtgcgtgcctgtggtcccagctacctgagagactgagaagggaggattgcttgagcccagaagtttgaggctgcggtgagccgtgactgtgtcactgcactttagcctgggtgacaaggcgagacccctgctctaaaaaacaatttttttaagttaatttgtagaaaaggtgttagatgttcattgccgtattttatgatggattcctgtttaaatgccattctcttaaaaaaaaaaaaataacttgtaggagtttttaaccgtaaaattagcatcacatgtttaccatggagaatttacaaaaaacaaacagaggaaaataaaacctctgtaatcatactactcagagataacttgctgttagatttcggtgtagatctaatactttttctgtatttatattaaaaatacttaaaacatatacatttctttgttacaaacatggtatcttatagatagtgctgtcacatagcaaaacagtgttaaatattctgaatcagaaaaggaagccgactctccaactgaaagaggtgttatcctagagactttttctggtgatggcaatttgttaatattcactttttgctttacattctgtattgaaatagtttttctgttttgttctacttttaaggataatataattgtatcatgctgtttttcacagaaatgtaagaaaaaaagatattaattttgtaagttaatagaggttgagcatcccaaatccaaaaatctgaaatcccagatgctccaaattctgaagctttttgagtgctgacattatgttcaaaggaaatgttcattggaagatttcagattttttgatttagggagctcaacaaataagtataatgcacatattccaaaacctgaaaaaaatcctacattcagaatacttctgatcccaaacatttcagataagggttattcaacctttactgtcagatgatcccaaatgaaaaatattaatcgttaaccaaatgtcaaggaattgatcacattttacagtttctgcctaggattatgaatcaagatgaaaaggctctgcgtgtttaaaaatatatatatttttattttcttataaatcttaaatgtatcaacacttaagatgtatttgatatgtggaatccattcatattttggattaaacaattctgtcaagaccgtggcagtgatagaggatttttttttcccactgaactatcacaaaattggaaaaagagtaattggagaaccccactggcttggccagctcgaagccccggagggggcaggcagtgctgtggatgggagcgtcgcagtaccacgctgcccctcctgcccatggatctctgaggcctgcctttgtcctttgacccttggccatttgttagtgtctctgagagctggactgctgtaccctacttccccaggggggcctgacttcacacagcctctgctgcagtgcgtggttggaggtgacggccttggtaaatccagtttcctgcctcctcaattatttgtgctcatacactgtatattttttagtgaggtttatatttgagatgtgttttctccttcttaccctttctggcctttctatggattaatacctggtctcttcttgtgtacttgaaagtgaatctctcatcgtatttttccttagtgtcagaacctccatgactccgagcacttaacgtggctcattgtaaatcacattcaagatctgatcagcctttcccacgagcctccagtacaggacttcatcagtgctgttcatcggaactccgctgccagcggcctcttcatccaggcaattcagtctcgttgtgaaaacctttcaactgtacgtcttcatcctgccaacaattgccagttgcagttttctctgccttaaaaatggagtattgaaatttttaactttaatttctgactggcaaaatagtcatcttttgttcttttccttctcgctgttagccaaccactctgaagaaaactcttcagtgcttggaggggatccatctcagccagtcgggagctgtgctcacgttgtatgtggacaggctgctgtgcacccctttccgtgtgctggctcgcatggtcgacatccttgcttgtcgccgggtagaaatgcttctggctgcaaatttacaggtattgggaaaagaaaccctgatattgatttatattgaaaatttagcaggccaagcaaaacaggtggctgcctttttcctccataggtgtggtcttgacacggtcaccaatagaaacatggaaatatctgcaaacttgccattcctcgtgtgtctgatctgtttcttgaacttttttctagtctgtccttactaggatgaactgtacacatcagtttatcctttttaaatgagcatgaggttattttgggttgtacagtgtcacaaacacactaatgtgtttttgtctattagagcagcatggcccagttgccaatggaagaactcaacagaatccaggaataccttcagagcagcgggctcgctcagaggtaatgctggaaacacaggtcatccttgtgttaggagaacccaggatataaaagatatagatttgtgcgggaataaattcacaggacaagaaattgatgtgcgttataggtgggtttgctgcagaagtgccataatagaaagcttcctacttttaaaacaaccagatctcactttatatggagtaaaggacaaccagcaggatcacgtctatgacatgagtggaggcagtttgcactccttttggctgtttgagaggtagtatttagaatgcctgtattcactgtcctgtgatgagtgggaaaataggttatcagctttatcttagcaaaatcaaagcatatcatctaattgctaaacaagagttggcaaatctgaaagacattactgaatccttggcatgcaggacttacatctgcatcccgttgccattttttctcttcaaagcatttaatcacttagttgtgtttgcaaagtcttttagaagcctttatcagaaatccttacatctcctatgtgagtgtatttccatgactgcaaaataagttaaacttttaccttttttcttcccttggtgggggcggaaattgtgtgtgtgaaagggaaagagagacagcagagaaggagaatataattatcatgctgtgtcctttgagctgaaattgcaaaaaagaaaacacacacacacatgctttgatttcagtcttaagagtaccttgttgatggtgtttttaaatgggattgggcacaattaggtggacagtttggggcgatttttcggtctgtagggccaagctgttttgtaatttgctttataaagttgtcactctcatagcatatggtggcagataaactattattactttttgaccctagacttagtcttcagtccagatgagggagattaaaagattataaatatcttgtgccagatgaggtgattttattttgaaatgaccataaattcctatcagttgtcttactgggatatttgatagtggagtttgtgcatttgagtcttagatgatctgttttacgtttattaagaaagcctttattagcttttataccatgtatggactgttgcaatgtttgagtataaatgaaatttctggacaatattaatggagtacaaactgtgataccttagaagtaaactagggcctgcgtttatatcatgacctgtttgagtgttgatgagaaaatagctgtgaagaaaaagttttaaacaagtttcattttcctttaagaagccactaatagtgcatccttagggtgtatatttctagaatcctagtgtgcagagtttagactaagactaaaaaaaaaattgcactgtaatttcctttttgtttgtattttagacaccagaggctctattccctgctggacaggtttcgtctctccaccatgcaagactcacttagtccctctcccccagtctcttcccacccgctggacggggatgggcacgtgtcactggaaacagtgagtccggacaaagtaagtgtccagcgtgtctgcatgcgaggcacagggcagagtgcctctgtcacctgaggcagatacagagagtgcagaggaggtgcggtggacccaaggagtgctggcgctctgctcggctcaatgaagccgtggttagagacctggggggaccatcaatgtccgagggagcaaagcagtgctgatgtgggaccgtttcggtaggagtgcgaggtgagtcgttagtgggtgactcaagggaaagtcaattgtggcctgcaggcccctgactgcacaggccttcaagcacatgtcagtgcatttagcctccctccatcgcctcataccttctggccacctgtgagttgcactgccactgccagccatactggtatgttgtcagcacctccactgctcatacctcaccgttagggaccacttggggccttggtagagccttggtactctactttcctggagagagttcagcttatgaatatgaatttagatttcaaaaaccagcagcccaagtataagaaagcgaaggttcagtcctgccgccttaggctctatttgctaagcatctgccctgccctgccctggttgctgggaagagatgagcaaagcagacagcccaggagaggatggcaaaggggccgctaacccttagtagtttagctatatttggaaggactattagaaattcaccaggtgaagggggaggccgtgagagtacccaggtaggtaacagaagtccaaagaggaagacctgtggtgtggtgagctgtatagccacaacatgccggccggaggccctctcagttagcctagtgcagtgttcccaagcactggcctaggcctgtagctccagggatgtgaagtccccttgaacgccacccatcatgttccccttattcatctttttcttcccaggactggtacattcatcttgtcaaatcccagtgttggaccaggtcagattctgcgctgctggaaggtgcagagctggtgaatcggattcctgctgaagatatgagtgccttcatgatgaactcggtacggggggagcagcggaagcaaggaatcctcagcttttcttgtgacttccaagtgggatttgtctcctcatgtgacccacttgttgacaacacatgttgaggactccactctggatggggacgggatgacggagagactccactctgaatggggctgggaactggggaggactccatttcagggggccgggacatgggggatatgctgatcgagattgtttcagccacattagaatccaaggaggcaagtcgatttcactcaacctttcatgcatttaaagaaaatggaggtggtcttagattacagtcatttcactggtttgttctcatggcagtgaggaagggtattgggattggtgtctgtcttaattcaggatctttgagaagatggagagcactccctcagggattaggagagactcgagatggaaatgaagattttactacttacaggtcctggcgggtacatggcatgcccagaggcccctcacacgtggaagttgggggcatgtgagggaatgaagtgtggtcctgggcactagggtgggggacctgagcggnnnnnnnnnnnnnnnnnnnnnnnnnnnnnnnnnnnnnnnnnnnnnnnnnnnnnnnnnnnnnnnnnnnnnnnnnnnnnnnnnnnnnnnnnnnnnnnnnnnnnnnnnnnnnnnnnnnnnnnnnnnnnnnnnnnnnnnnnnnnnnnnnnnnnnnnnnnnnnnnnnnnnnnnnnnnnnnnnnnnnnnnnnnnnnnnnnnnnnnnnnnnnnnnnnnnnnnnnnnnnnnnnnnnnnnnnnnnnnnnnnnnnnnnnnnnnnnnnnnnnnnnnnnnnnnnnnnnnnnnnnnnnnnnnnnnnnnnnnnnnnnnnnnnnnnnnnnnnnnnnnnnnnnnnnnnnnnnnnnnnnnnnnnnnnnnnnnnnnnnnnnnnnnnnnnnnnnnnnnnnnnnnnnnnnnnnnnnnnnnnnnnnnnnnnnnnnnnnnnnnnnnnnnnnnnnnnnnnnnnnnnnnnnnnnnnnnnnnnnnnnnnnnnnnnnnnnnnnnnnnnnnnnnnnnnnnnnnnnnnnnnnnnnnnnnnnnnnnnnnnnnnnnnnnnnnnnnnnnnnnnnnnnnnnnnnnnnnnnnnnnnnnnnnnnnnnnnnnnnnnnnnnnnnnngagaaacctcctggtgctttagccgtgcgttgatacacagcagatgggagggaagtgggcacccgggaggacaaatgcatgtagaggctgggggtggaggcaggtgttcatgaaaagagaccttacagggagggcaacacaacagtgtgttctgatgtactgaagagctagactgaaaagaacaggagaattcacccaaaatccatttactaaaattgtttatcctttttttttttgagacgaagtctcgctcttgtcccccaggctggagtgcgatggtagatcttggctcactgcaacctctgcctcctggatttaaacaattctcctgcctcagcctcccgagtacaggcatgcgcccaccacgcccggctaatttttgtatttttagtagagacgcggtttcaccgtgttggccaggcttgtcttaaactcctgacctcaggtgatctccctgcctcagcctcccaaagtgctgggattacaggcctgagccactgcgcccggcctaaaattgtttatcttaagattcatgcagtgaaaactaacttactgagtgataaatttgcttagtgatctgtttattaggttttctaaatttgctaattgggctttgaacagctgtaaaagttctgactgtaaaagaaagctgcaacttttggcattcatgatgcttttctgaatattaaactaagatagatgttttacctgaagaattggcccccaatcttataaatggctaaacaaaaaaggttgctaaaacataatccaaattgtcataggaaataccatttttccaaccaaaattttgtcattcatatggctacttttacttatttcagctgcatttgaccatctttttcaaacttcagggatggctggtgtatcaccgagatcttggatgacactttagctttgattttctgtttttatgaattaaaattgtcataccaaaatttttacttcaagcaaatccaagagcataaaaaattaaaatatcacttaaagtaccaagagagaacagaaatatattttactaagcgtacgttgaatgaagttgttcaaatatttgtaacaggcatagagtagaattttcttaaaaacatttttgatggtataccaatctgtgttttctcagaaacatttgccttattcttttttctgttgtgtttttcttacctgattgaaagctcctaatctgttgttattgtttgtttaacctttaatgctctgatttcaggagttcaacctaagcctgctagctccatgcttaagcctagggatgagtgaaatttctggtggccagaagagtccgctttttgaagcagcctgtgaggtgactctggcccgcgtgagcagcaccgtgcagcagctccctgctgtccaccacgtcttccagtccgacctgcctgcagagccggcggcctactggagcaagttgaatgatctatttggtaattaaaattaaaatttatcttatttttagaaaggttccagggccagtatagtactttgcaccaagtaaatatacaataaaggcggtggatctaatacagcgaaagcgtttacagaggcagctaaagagcagcactggtggcctcagcgcagaatttcttcctgcgtgtttgccactttgccgttcattgacgtggtcacggacatagggctctaagcccttgaggaaggctgggccagacctcaggggagatgcagccccaaactacatgcagtcatgtggatggatgcgtagatgtgccattgaggagcaatgtcttgtgctttcatcagattctcaaagaattgcttgactgcctttcgaaggtgttgcatctgtgctcatgtttgcacccacccacgagggccttctgtttcaggggatgctgcgctgtatcagtccctgaccactctggcccgggccctggcacagtacctggtggcggtctccaaactgcccagtcacttgcaccttcctcctgagaaagagaaggacaccatgaaattcgtggtggcaacccttgaggtaagaggcagctccggagctcattgttgctgtgggaggggacacggggctgacactggagagggtaaagcagttttatttgaaaagcaagagctctgaccaatccagtcactattctgtctcagcctggcagtaagtcttgtcaccgtcaagttattgtagccagccttcacccttgcctcgccactcctcacggtggcctgtgaggtcagccaggtccccttctcatctgcacctccagtgttatgtggatcgtaattttagagacttgaaaaataaccatctgtaggtactttgtgtcttaagttggcctggacatgtcagccaaggaatacttggtttgtgttagtgcttgtaattagcccccaaaacatgtacacattctggatgcattaaactcaggcctgtatccttaaagggccatctctgtgctgcctgccctcagcagggacacactttgcagacccacagaggctccgcctccacctcacaccaaagaaagggaggagtccaaagggcatcagtgccgttactcacaaaatgataaatacacccttattctgaaccaggtggagtcagatggtttgtgatccctgtcctttaggtttcagcttagtggggaagtgggaaagccagcgtgtgatcacagcacagggtgattgctgccgattatattatgtgcctgctgtgtgcaggacaacatactttacacgcatcatcttatttgactctcacaactccctgtgagataggctctgttactcccatttgacaggtgaggagagcaaggcttagagaatttcagtgacttgcccaggtccactgagctaggaagtagccattctggcgtttgaactcaaggcctgctatccctagaacccacgctctcaaattcaacctctgaggctatgccagaggcaagccccagtgctgtgggcgccccagggaagaacctctggcctggtggccacgtagcccaggagagatgtctacaggagcccacagcgctgaaggagagaagggcagcagagttaagggggcattctggcagagaggggactggcaccttggggaatagctgggtcaggactgaatgtcatggagtcaggtcagagctgtccttctggagggcaagggcatctggacctgcttcccctcaatgctttggacggttccaccacaactgattcacacggcctccccaaatgaaggtacacgagcgggcattctgtgacttggtacttccctttaggccctgtcctggcatttgatccatgagcagattccgctgagtctggatctccaggcagggctggactgctgctgcctggccctgcagctgcctggcctctggagcgtggtctcctccgcagagtttgtgacccacgcctgctccctcatccactgtgtgcacttcatcctggaggccggtgagtccccatccgtgaacaatgggttcctatcctagttcctgtctagttcaccatgtttatattttgtgctgcctgtttgccaggtactaagctaggaattggggatggagaggtagataaaatacgcattaggaagggctgggctccatctctttttttttttttttttttttgagacggagtctcgctctgtcgcccaggctggagtgcagtggccagatctcagctcactgcaagctccgcctcccgggttcacgccattctcttgcctcagcctcccgagtagctgggactacaggtgcccgccacctcgcccagctagtttttcgtattttttagtagagacggggtttcaccgtgttagccaggatggtctcgatctcctgacctcgtgatccgcccgtctcggcctcccaaagtgctgggattacaggcttgagccaccgcgcccggccggctccatctcttactctccaatatattggagtctacactggaatttaacttgaatttgcttttttagtcattttatttagattttggaatttcagctttcatcaaaattacttctaaattttatgtctctgtgatctttggtcttagctgactgttttatgcatttagtcttatatgatcgaaaggttagtaagattacgttcagaagattgttttctgttcaaatgcttgtttctatactgcactataatattaacgtactgtaaaataaaagtggcttattcttttcaaggaacagtatcctcaacaagggttattagccacaatttttaaaaaattggacatcatggtttacatgttggagggcattttgaagctttgtattttcaaattaaacattatagagtgatgttttgatgtttcataattgttttcatctgtgcatttgtggccagcttgaaaacaaagatccagggattaatacttaaaagccagacttcttgggggttatagagatgattttggtagtaatgaatcttgagccgtctgataataacctcggggtgagagatggccaacaggagagagtcgagggacttacaaatctgaatgaaatctgaagtacaaatcttcagacatatgccactaaccaagagattggtacctcagtctaatattgtctgtttgtctaaaattggttctaagaaatctaggctcatctgtctatccctttgaacttttgtgaggctgcacaaatgtaaaattttgaatgaaaagcactgatggaagtctgtggaaattcttctgtttgttctgttgtaattttagttgcagtgcagcctggagagcagcttcttagtccagaaagaaggacaaataccccaaaagtcatcagagaggaggaggaggaaatagatcctaacacacagagtaagtctcaggacccattctttcttacatgtggttcctccaagacttaaaagtcattcacagagacgtgcgccgtggtgagtgtgcactcctggaagcgcaccgtagctcggctgtgtcctgctgctcctccctcgccgtgggaggctttagtccattgctttgccacactcttttgtttcaccgtatccctgtgcatgcggctgtttctgaccctacagagcagctgggatgcctctgggggagcccttccccgctccagcacttccacatgcggttactctgggctcctggagggcagggagcaggtttgtcttctctgtgttctcagaaattaatgcttggcccctggtcagcaagcagcaaccttttgttgagtgatactgaataaatacatgtttcccacatgagtattcagtaacctcagtgtcaggttcaggcatctgttttggtggatatttaaaagaaaattccacttttcctacagaaaaaaaaaaataaataaatctaaatcccagtgatttaagccagttatagacttagacatatactacggcttttcatgccctttcctcccagttctagagtagtattttactaggaaaatggtggcaatgcctgttgagaggaaaagtttttggccaagtgtctttcgttcttgccaggggccctaggctgctggggctacttcagtttctttagcccagtgtctggcagggaatgctccctgtagcctgtcccacagaggcaggggtgcctcacctggggcctgtccacgcattttacacagcacccttacttggagcatcaggcatcttttccgcgttccgtggctcaggaaacacaccttttcaatcatgagttcgccagtgcttttgggctttttctcccagcttttgtgcaatcctagttatggatggagttttcctgcctttagtcttctgcatagtacttttttcttctggttcccggttcgaggttttgtaattaaagaatgacccagaagcagtggcattttcttttcttttctttcttttttttttttgagacagagtctggctctgtcgtccaggctggagtgcagtggccggatctcagctcactgcaagctccgcctcccgggttcacgccattctcccgcctcagcctcccgagtagctgggactacaggcgcccgccacctcgcccggctagttttttgtattttttagtagagacggggtttcaccgtgttagccaggatggtctcgatctcctgacctcgtgattcacccgtcttggcctcccaaagtgctgggattacaggcttgagccaccacgcctggccagcagtggcattttcatacacagccaaggtcttctctgaatttttatctcgaacctctgtgggtccttcaggcttcagtttgtgatttcatgatttcttgttgctacctaaggaatatgaaaacacccacctccctactctgcgtcttccagccgatggcacctcaggctcttggtcctgtgcttctgtggcgaggataagaatagtgccaaccatgtggattgagatagatcagttagtccatccatgtcaagcacctggaatggatgacagtcttgttgtgaatactcaacagatgctaccatgactttagttagatttccattgctttgaaacagttgagacatctcagagctttgagccagagcagtgggccctgatgcaggttctgtttggttgaagatgattgtgcttattccctgtggcccttgtagaccggagtgggaagcttgcttgattttaatcacctcgataggatcttacttcttaaaggtcatccaataaataatgagccaactcattagcctggggcttaattgcttaagtccaatgagaagtcattctctatcctaggaagttgcccaaactgtagaatctcgtggcctgtgggtagtagccacttactacacattcactgactcaacgaatcatatttttagtagatacaatattctagactcaagacaccatgatgtggatcttcccaggggtgtgacgtgttcctcggcgtctgccttgggagtttccatttccatcagaaccatgccccagggccctcaaacactctgatctaggaaagccagtgaagcaaggatgacagcgtggccctttgataccagctgagggacagacacaggtcctgggagaccagagaaagacaaggggcagaggaagtgtcctagagggtgggccagagggctgggaacgaaggccagagctcaggttcaggaccattccagcaatcccagcagaaaatggggaggattgtatggtataggcggatatgaaggaggtagactctgcaagctttcagtggccaactcattctaggtgattccacaattacagcttgagcagctgcttgtcggtcatgcttcttacactgggcaagtagaatgtgttttttaaaaagtcttctcttaaccattgcttgtttagatccgaagtatatcaccgcagcctgtgagatggtggcagaaatggtggagtctctgcagtcggtgttggctttgggtcataaaaggaatagtggcgtgccggcgtttctcacgtcagtgctcaggaacatcgtcgtcagcctggcccgcctgccccttgtcaacagctacacacgtgtgcccccactggtgagtctggtcgttccgtgtagaagaccaagtacggtgaaacgcatgggtaagccctgggctgggcacaccggagagggcagggcagagtccccgcggcccagaggctgccagctgtggttctggtgccagctgtggttctggtgccagctgtggttctggtgccagctgtggttctcgtgccaggctgctttcctcaggcaccgtatgtggaggtcgctagtagaaatactgggttttctaaaatgaagtgaggccccacatccctaagagattagtgttagacttgattctaaagcaactagaccactttgcttactggtagaccagaaaccacactccctcgagtgagtgagattttcctttggaaataattcatgtttttctacacaattttgctgttgtcttcagaatcggtttaaagtaggtgttattgctgggcacagtaactcatgcctgtaatcccagcactttgggaagccaaggcgggcagatcacttgaggtcaggagtttgagaccagcctggccaacatggtgaaaccccgtctctactaaaaatacaaaaattagccaggtgtggtggtgtgcacctgtaatcccagctactcaggagactgagacaggagaatggcttgaacccaggaggcggaggttgcagtgagccgagatcacgctactgcactccagcctgggcaacagagcaatattttgtttcaaaaaaaaaaaaaaaaaaaaaaaaaaaaaagtaggtgttattgatcaggatgcttgtttcagataacgaagagcttagcttgaggagagtgagggttgatggaaggggactggcttctgctcagtgaaatggcatcatcccccaccagcctgctgaagtaagatgatgggacctgttccttagggactgcagcatcctcaggcaagaaagaaaggccgaccggcagggtgtgagccagcaggtataggtcagtgacaatggagctgggtcccagggaagaggcttgtggctgcttgagaagggcgcgtgcccgtctgcgtgcgcgtgtgtgtatgtacgctggagagtctggggaggcttgctccaaggacacagtatttgatcctgagacatgaggagggttctgccgcaggcgatgaaggtattcagatggagagctcattcggaagaagaggccagggcctggtggtgctggaagcagttgcagaacagggagttgtaagctttcctaggaagagcagcaggagtgctggagaagcaggccacccttgctgcatgggggttgctcttggccccactcttggtgcacggcgagtcactgtgagttcgttagcatctggttctgaaacagtaactgctcctttggaggggctcggggagaccatgtaggagggcacagtcaagaggtcatgctatctggaacacacttgaggatatgccaggacggactgcatgctgtagataaaattcctctagcaagctcttaaccggcattgaggagttccctgagtgcggtcatctggaaggcagctgtgaaaggcactgcagtctccccccgggcaggtaccaggagcacaggggagcagaactgatttaaagagagggctttcctgtggtgaggtgagagatgagctggtcattatcatagaacccctctgcctgtgtgcagatgcgctgtgggaatcctggggttccgttgggtcctctgtcacctcactgaaggcatgtcagctgagctggccagaccttcagctgatcctgccacttgaacagcatcaagcctgcctctggattcttctgtgcacggtgcttgtctaatcacctcatgcacagagaactgtacttcagagtttacagaaataagctgtatggttcattttcgtgcctgcttgccaacaaacatatctgagctgaacttcattgaacgcctgcctttattctaacacaccatctgctgtttgtgggcgaggggtgctgtctctaactcctgcctgcctctcccagcatccctgagtggggtgtgccagcagcctcagggtgaggacaggaagtgggagggcagagcagatttggaagggccacttgatggggaaggaagtcccaggaagcagttggagctgttttctgggggagaaggtgccagcttggggacagtgttgtagtgaggaggaagcccagtggagagaagtggggcttcctgcttcctcacagtgtgtctgtcctgactcagctcgggtgatgtcacttccttttcatcttctcaggtgtggaagcttggatggtcacccaaaccgggaggggattttggcacagcattccctgagatccccgtggagttcctccaggaaaaggaagtctttaaggagttcatctaccgcatcaacacgctaggtactcttggggcctctttcaggtcaccatcgtcgggcatgtaccgggaggaaatccagagccccagtactgggatcttctcatttgactccagaaaagatttaagcatgataataatacaaacctgtgtgaatacattttgcagtgtcagcaaaactccttttactgagaaaatagatcccagttcctgtgttttgtggcttgaatcccagctttttatattctgggcttgtttgaagtcaggaaagattcatgtgtaacagacaacgtgaggccaaattctgccttcgattttgcatttaggctcaacagtggcagcgcttgtctcggagtgtgttctcgtgttcaccagtctgatcctgttgtgtctcactggtgcgttttctcacatgggaacaagcagacgggagcagatggagtcaagtctcttagcactcgccttcctcagagcctagaggcagcatggggagaaagcgggcttggggctcagacagtcctggtctgcttccagccctctgtagctgagcagcgcggaacaagtccttctaacctctagagaccctcagttttgtcaaatgtaaaatgggagtcacgtctatttcatagaattgttgcagatttagaaattacatttcttttttttttttgagacggagtctcggctctgtcacccaggctggagtgcagtggcgcgatctcggctcactccaaactccgcctcctgggttcacgccattctcctgcctcagcctcccgagtagctgggactacaggcgcccgctgccacgcctggctaattttttgtatttttagtagagacagggtttcattgtattaaccaggatggtctcgatctcctgacctcgtgatccgcccacctcggtctcccaaagtgctgggattacaggagtgagccaccgtgcctggcctagaaattgcatttctaaacaagtgttagcccttatttctaaataagtgtcgaaatgaataagtcaccactttcgcccctatttgatggcaagaggtgtgatcttgtggtgggattgtaatcagtcagtcctcagtgactgtgccctgctgtggtgtttcctggaaagttcttgtcttgtcctagaaagtctggcaggggcaccctgtctccactgtccagtcttctccccaggcccttcaggcttctgcaaatttgaggcttgttttcatcccagaaggttctggcagcagacgccttgcgtctactgtcccctttagttaattagataattcaatgtccaaagggaaccctgagcaggaacctcaagccagctgcctcacggagctcctcctcttcctcactgtgaagattggtgtcagtggcctcctggtctcccccttgcctaacacgagctcctttgcttacttgggtgcccttgcccttgaactccccggcagacgtgcgtgacccaagactgtgctacagtccttgtttttgttcatgctcatcttcttcttggttcattgttttccctgtaatgtcaattgttttatttgtctgtatctgtgtctgaatcagtcctgcacgctctccttctctctgtcttttgttctttctttacccagtttatcacagggacccccgatgtccatttctctagttctcctgtcctaagcaccccatcctgtctttctggccttatcacaagtggcgtgtctgcctcagacatcatgatgggggcatgaagcacagctgtcagaaacaactgttcgttaggtacactcgaattcagctcatcaataggaatggagggtctatcagatgtgttttcactgaatccctgttcnnnnnnnnnnnnnnnnnnnnnnnnnnnnnnnnnnnnnnnnnnnnnnnnnnnnnnnnnnnnnnnnnnnnnnnnnnnnnnnnnnnnnnnnnnnnnnnnnnnnnnnnnnnnnnnnnnnnnnnnnnnnnnnnnnnnnnnnnnnnnnnnnnnnnnnnnnnnnnnnnnnnnnnnnnnnnnnnnnnnnnnnnnnnnnnnnnnnnnnnnnnnnnnnnnnnnnnnnnnnnnnnnnnnnnnnnnnnnnnnnnnnnnnnnnnnnnnnnnnnnnnnnnnnnnnnnnnnnnnnnnnnnnnnnnnnnnnnnnnnnnnnnnnnnnnnnnnnnnnnnnnnnnnnnnnnnnnnnnnnnnnnnnnnnnnnnnnnnnnnnnnnnnnnnnnnnnnnnnnnnnnnnnnnnnnnnnnnnnnnnnnnnnnnnnnnnnnnnnnnnnnnnnnnnnnnnnnnnnnnnnnnnnnnnnnnnnnnnnnnnnnnnnnnnnnnnnnnnnnnnnnnnnnnnnnnnnnnnnnnnnnnnnnnnnnnnnnnnnnnnnnnnnnnnnnnnnnnnnnnnnnnnnnnnnnnnnnnnnnnnnnnnnnnnnnnnnnnnnnnnnnnnnnnnnnnnnnnnnnnnnnnnnnnnnnnnnnnnnnnnnnnnnnnnnnnnnnnnnnnnnnnnnnnnnnnnnnnnnnnnnnnnnnnnnnnnnnnnnnnnnnnnnnnnnnnnnnnnnnnnnnnnnnnnnnnnnnnnnnnnnnnnnnnnnnnnnnnnnnnnnnnnnnnnnnnnnnnnnnnnnnnnnnnnnnnnnnnnnnnnnnnnnnnnnnnnnnnnnnnnnnnnnnnnnnnnnnnnnnnnnnnnnnnnnnnnnnnnnnnnnnnnnnnnnnnnnnnnnnnnnnnnnnnnnnnnnnnnnnnnnnnnnnnnnnnnnnnnnnnnnnnnnnnnnnnnnnnnnnnnnnnnnnnnnnnnnnnnnnnnnnnnnnnnnnnnnnnnnnnnnnnnnnnnnnnnnnnnnnnnnnnnnnnnnnnnnnnnnnnnnnnnnnnnnnnnnnnnnnnnnnnnnnnnnnnnnnnnnnnnnnnnnnnnnnnnnnnnnnnnnnnnnnnnnnnnnnnnnnnnnnnnnnnnnnnnnnnnnnnnnnnnnnnnnnnnnnnnnnnnnnnnnnnnnnnnnnnnnnnnnnnnnnnnnnnnnnnnnnnnnnnnnnnnnnnagaaaataaggcagcagactggtgtttctttcttttttttttttctcctaccttattttgagagagtagccagatggtgtcttgactgatattccagagcagggacaaagcccactgaggtttgggggctgcaattaccaatggctggaatgcatttgattacggtgcgttccatgttaaggatcaataagattgtgctctttctggaaagtatcttttagttttatttattggtattcagaggagtgtaggttgaattaaaatgaaaaggcattttataaaggccgtgagtagtacatggtttcatttttctaatgtcttgcagagattttattaggcttctcgaagtgttcacgtacattacgttaatgtgatactaagagtaactgtactctggcacagcgaagccagcagaatgggaagttgtggaatgcaggcccttgattctgatagaaggtgtggtatgaactcgcagaaatgacagtttggagggtagacatatgtcacaagtcatcaagattgtctttaaattcatccatagaagctaacaggttgtcataagcaaagcctctaaaatgtatgagggaattcaaggataatttatcaaaaagtaattcatgtttggagttttgtgcccaaaggagtccttgatttgaaaaatgggtgtttgcccatcagattgtttcagggtccgtatgtgcagaggccgtgcctcgtgccccgtgagctcagcctgacagaagtcccttggtagcacttagggacttggttagcacttcttccctttgaggcagggtggactctgggttctgcattcagagctggctgtgggtgtcttgctgttcttgttgacctgtgggctctccttccaggaagacacagagaggacgcagatcaacgtcctggccgtgcaggccatcacctcactggtgctcagtgcaatgaccgtgcctgtggccggcaacccagctgtgagctgcttggagcagcagcctcggaacaagcctctgaaagctctggacaccaggtttgcctgaattcccacgtgtctccaggacatcatgggtgctgcggacagtggggtccccgctgaagcatccagcagcttcccccaggctgttttcctttgttgctagaattgaaaacgctgtccatgtggcctgtgcaggaggtgcagacccaaaggtggcctcttggccattgaggagctggaaacgcgacgggaactgacatggggttattgggcatttaggggtaaacattagcagagcaagaatgagcgggcaagtggtagaacacccacctaagggctcatggacaggtgctcacttaggaagtgagtttcgtttggtattacaccaggttcctttaggcagggcggagggaaagttctggcgtttttcacttgtaagattttgaaggaaacaaaacactctttaccttttttctgaaatgtaggtttgggaggaagctgagcattatcagagggattgtagagcaagagattcaagcaatggtttcaaagagagagaacatcgccacccatcatttataccaggcgtgggatcctgtcccttctctgtccccggctaccacaggtacctgagggagagggtggggggtggctgtacttgggctgggatgagaaaagactggcgtgctcaccacaccagttatgcaggaagacctgagtgtggtttgagttggaggctgtggtgctaaatagctgccccattcataagcaggagtcttattcaggcccagggaggaaataaaatctggaaatgaattaggagcattatctcctgccagtcaattctcacgggctgtaagaacagcaggatttaaaagttgaatgagttccttatgttaagaactcaaccgagttcatctacacaagctgaatctccagcttttcctaagaaaccaggtgtggcagtggctgcagggcggggcacagctgggcctgagcaccccgctccctgcacctctcccctccctgggccctgtctgtcggtgcccactctcccaccaagcctgccagttgtgtgcctgccctatcacaggcatcagagtttgtcacctggtttaaaagaagggagttgtgtagggatctggggatgcacatttttcactgaacagtattttagcatagaggtttgtgattccctggttatttaggagtttaagcaccttaaaggctttaattgcagaaaggtctatgtggacatgcaatgtgttatacgcagtgtctatgaccctcaaatgtttattagggtattgaaataaactgagcacttggagggccatggatccagcttcaaggagttcataggtcaggaggacccaggagcaatgacctgtcgtagacggcagaaaagaggggcacagaggtgggttgggggcatacacaggcagctcctggagctccaaggagagcaagtgcttccagggaagggggtgtggaggctccttgggaggaggcgagttgatgctggggtctggcagagggttagctggggacattcggctggaggctgttgtctgggaattggggggatgcccagcagaaagacatgcggaggttgtttggcctggggcgtggggggtgtgagaggtcgagtgggggcattatcctgctcccgctcctgctggctgtatctggtcagcctgggcaccgaggcgggttctggaaagcactgttcacagatgcttatctgagtcccccagannnnnnnnnnnnnnnnnnnnnnnnnnnnnnnnnnnnnnnnnnnnnnnnnnnnnnnnnnnnnnnnnnnnnnnnnnnnnnnnnnnnnnnnnnnnnnnnnnnnnnnnnnnnnnnnnnnnnnnnnnnnnnnnnnnnnnnnnnnnnnnnnnnnnnnnnnnnnnnnnnnnnnnnnnnnnnnnnnnnnnnnnnnnnnnnnnnnnnnnnnnnnnnnnnnnnnnnnnnnnnnnnnnnnnnnnnnnnnnnnnnnnnnnnnnnnnnnnnnnnnnnnnnnnnnnnnnnnnnnnnnnnnnnnnnnnnnnnnnnnnnnnnnnnnnnnnnnnnnnnnnnnnnnnnnnnnnnnnnnnnnnnnnnnnnnnnnnnnnnnnnnnnnnnnnnnnnnnnnnnnnnnnnnnnnnnnnnnnnnnnnnnnnnnnnnnnnnnnnnnnnnnnnnnnnnnnnnnnnnnnnnnnnnnnnnnnnnnnnnnnnnnnnnnnnnnnnnnnnnnnnnnnnnnnnnnnttgcagtgagccaagatcacgccattgcactccagcctgggcggcagagcgagactctgtttcaaaaaaaaaaaaaaaaaaaaaaaaatctttaatgttcattgtttttgtcctttttattcctaggtcccacaagcagagaaaatattacttttgtttttatttatgttctttattctagaaagtagttaagagacctcacatgtagtgatagagatgtatataagagacagtgagagggcctgagctggacttaagcaaggaccgtgagacaccaaaaggggtgaggacagagtggagttagctgagatgctcaggaggaagtagatgccatgaagggctctgttgtggggggctgcaggcttggccctgagtgtccctgtggccagttgttggggggggcccagtgtgcaggcagacagctcggccactttgtggcaggtcacgttggtctgtgcttctgtttcctcctcaggtaagtgaagggatttaagggtccaggtgtggtggctcacacctgtaatgtataacattttaggaggctgaggccggaggctcacctgagctcaggcggttgaggctgcagtgagccatgattgcaccactgcactccagcctgggcaacagaccaatactctgtcacttaaaaaaagtgtaaacagaaacacagggccatttacatatgatggcacatggcaggagccccacaggtgtatgctcaggggagggcccagctttgctggctgacttgcacctatccctccaccctgtgctgtgtctttcgctcactgggttcctggtttagtgaaaccagttgtgcaggacggttcccttggtagcttttgttgcagtggaaatgggtcaggatatggtgtgtagaagcacttatgagctctgagagtttcctcttatgacttcctggcctgcagccttcacagcagaaaccccatgatgtcacacgcctgtttctgttccctgctctgtgccctgtactgtcctgttctgtgcctgctggtttcagtgacaggaggcagggagctgctggaccagcctgtatttttctagacatagttggaaaaagaagtcacgctcttctgtcctctcacctttgacagatgtttccacctcaagataagtggacatggccaataggacgcactgtacttttcctggatgtgtttctgaagggcaggctgagagtgagaggcctggagctcactgggtgcctgtggccttgtcctggccccggggacactggtctgtgcccgagatactccctattccccacgccccactgcatttgcccacatccttcgatgtttgccctgtgtccaatgtctgcaaaccgactgtcatgggattatactggggctgaagtatagtgccacccctgccctgtcggggacgttcagccccagatgccactggactgagccactgcttgcttttaggaaagggggtgggggttatgggtctgggcttggggagcacaggggctgctccttggcctgagaattgttcatacagactccctgcccactccctgcaggggtgctgggtcccaggggggaaatggcccttggtgccaagaacgtgagttgggcctagggccagtgatgatggagaacagctttttatgggcacacagcccatagcactgtgccaagtgctcgaggctcccagagaagcaggcagaaaggaggacagtcgaggtgtgctgagcacgtggtggctgtgtgatctggagcgcgggtcacagaggcgcggggacgctctggcctggggtttaccacaatgactgccagtggcggagatcggaaaagaaatctcacgcgttggttccgtgttttggggggttccgtgttttggggggttccgtgttttggggggttccgtgttttggggactgcattgagatctcacttacgagtgagagcgtccccttcgtagagcctctttctgtgtcgcctcctcagccgctcctggggctggctgactcctgatccaggcccttagcgtgtgctggagcttcccagcagcagtccagcccccaccccaccctctctgtggactcccttgcctgtaagctggggtgtctgaacgacccttgcaaaggggcagactgttcaacggtaggcatgtgctgagtcccggcggccgcacccgcccaccaggagcctggcactgtggctgcagcgctgagcagcaccctgtttctgtggcaggtgtccatacactctgtgtggctggggaacagcatcacacccctaagggaggaggaatgggacgaggaggaggaggaggaggccgacgcccctgcaccttcatcaccacccacgtctccagtcaactccaggttttccaatggcctttttcttttctacagaaatttgaaatttcttatcagtcatttgatttgtttgaggtgcttcttgaaatgagcctctcatcttctgtacccagaaaacacccatcttgcatattctacaggaaacaccgggctggagttgacatccattcctgttcgcagtttttactcgagttgtacagccgctggatcctgccatccaactcagccaggaggaccccggccatcctgatcagtgaggtggttcgatccgtaagtgagccttcccattcccctcacactggcacatgccacacgcaccacacacgctgcacacacagacacgccacaccacacgtaccacatgcaccacacacacgtcacatcacacataccccacatgcacggaacacacacacgccacatgcacacgtaccccacatgcatgcaccacacacacacaccacatgcacacgtaccccaaatgcacgccccatacacctcacatgcacacataccccacatgcacacaacacacacatgccacatgcacacgtaccccgcatgcacacaacacacacatgccacatgcacacataccccacatgcacacaacacacacacgccacacgtgcacacacatacaccacatgcaccacgcacagcacacatgccacacgcacacacacaccacacacaccccacacagcccatacaccactttcatgcaacacacaccacacacaatgccacactcgccacatgcacacacaccacatgtacataccacacacatgccacacgcaccacacacatgccacatgcaccacacacatgccacaccacacacaccacacacaatgccacactcaccacatgcacacacaccacatgtacataccacacacatgccacatgcaccacacacatgccacatgcaccacacacaccacacacatcacatacatgcaccacgtgtactatgtacacacacagacacaccacacgcgtacaccacacacagacgcacacacgcgtcccgcgcagtcatgtctcttaggtgtaagaacacgacttgccagtagcggcgttctggatgtgttgcctggattctaactgcgctactctccccttgctttcctggtgttccacatctccagcttctggtggtctcagacttgttcactgagcgcaaccagtttgagctgatgtatgtgacgctgacagaactgcgaagggtgcatccttcagaagacgagatcctcgctcagtacctggtgcccgccacctgcaaggcagctgccgtccttgggatggtaagtgacaggtggtacagaggttcctgtcctgaagccatgtgggcccatctgccttgggacctggtgttggccagaggtgccaggtgcggctgcctccttccaagagttgacccgagccggactccacagcccacgtgagctgcagtgcttctcagctggagggggttcagcgacggtcagtgccatccacaggccaccgtgatgtgggtcgtggcggccaagccatggtttggggtcccgtgtccctgggcttgtgacatcattgtagtagcccatccccacagaaccatggtgtgtggtagcactgaagcatcgtagatggtggaaacgcgactggcttccccatgctctgccctgaggcctgactgcctcactccccctcagttatgttccaggccccccgaacttcctgactggacagcttctctcctgggggccattttgtcacagtgaccctgcgtttccagtcccaagtctgggtgctatagtgtcttcttagcatggtgtttctcttagtctatttcggctgctaccacaaggtaccttagactgggtgatttataaacagtggaaattcacttctcatagttctgggggctggaagttcatggtcaaggtgccaacagatttggtgtttggtgagggctgctctctgcttcatagatggcatgttctcactgggtcctcacggtgaaaggagtgaacaagctccctcaggcctttcaaaagggccccaatccacaagggctcacccctcatgacttcatcaccacccgaggccccaccttctagtactgtggcactgcaaattagttgtcagtgtaagagtttcgggggggatacattcattcagaccatcccaagggtcaagtgttcatcctcttgagctcctccttattctgcttctggtttatcaggattcagcccgtgcagcacggtacctgtgttctgtgggcacatcaccacatggcatttcccaagcatccatcagctgtacacatgaaatcgctacctgtgggccccgactgctggcaaagcctattcaaggatgtcagaactgtcagagctggagcctctgggtctttgtcatgtggcattacctagtaatccattttatgatagcaatagaaacgcgtgtcttcaacaaacacctcagtggctgccgtgtgccagccgtctggagcccttggtgagaatggcatggtagtgcccatcagggcctgcttaccccatgctctggatgggctcctgtcagtaacaacgctgtcgtgacagtgatgatgtttttttgccgtcactccagctgctaacatttgcggagctcttcctcctgcaccccacctgacaaaggcaccctaggcggccagcgtcagaggttagctggcttgtctgggtcacacaaaatgcggcagaggtgggactgagcccatgtctgtgacctgaagcctgactccctgcgagtcttgactactcttgcctggactctgtcctccccgagcccaaactccagtcatcttcccttgtgggtggccgtcagcctggtgccgtgctggtgacttggcagccatccagggagtggaaacaatgaacgcgtgggctccctgtgtgggcatctctcttcactgcgagcaccctctgggtgttgcccacatgatgtcaaagcggctctcggaaggggtccttctcctttatggggagtttcagctgctgggctaacttgaattgtaatgtggttttgtgctcaggcccagagctccttaggcaagtgttgtgccatcagtaatcaaatgagaaataatcattttgaaaagcagatcctaaggcaggatggtcatgggcactaattcccagctctgtgcatctttcttgaagacggtgatcctctgtgaaggttttcagcatgtcatgcttggtaccagcgtatccagagcatgtcattttgaggtatttgcctcctgttgtgaaatccgtgccacctgagagcaggtcctgatgtgggactttcagaggtgggaccaggggccgtgggagcgcagtccttagggaggtgccgcgtggcgttgtgtgtatgaggggatagcacagggtgaggtgggggcccaagaaggaagtgatccaccaaagaacagcctctttcggtcctcattcctgggatgggtgggagcggcttctgtgtcttccggtcatttcccctgcggagaagctcctgccactgccaagaacctcatcttgttccacaacaagaagaggctgcctggccatccagcgctccatgggaattctgtgtccccatagtcttgggctgaaagagagcgacataccttggtgacttctgcaggggtctcctcactgttaaagagcagattgaaagtgaagaatgtgggctaagtgtttaggtcgatatttaaccccattaggttttggatactaagtgaaattgaggccattttggttgaaggttggcataaactactatcagggatccccaagactacccccaggcttttctagaaggactctcagctaagatgtaatacagtaaaagcacacaaaacacaatcagcaaaccaaatcagcaagggcagaggcccatggggcggtgtcccgaggaaaccaggcccgagcttccagaatcctctcccggcggggtcgtgcaggacacactgagctcccccagagtgagccgtgacagcgtgtgcagtgtcgtcaccaggctcaagcttccagaatcctctcccagtggggtcgtgcaggacgcactgagctcccccagagtgagctgtgacagtgtgtgcagtgttgtcaccagggaagcccactagagactcggtgccagggttttgactgcgggctgggcacgtgggcaccttctgcctgcttcgtgcccatactctggactcccagagggaaggcagattctcagcacaaacaccgttgcccacacaagcagctgagcacagagagcccctcctcagtgaggatggtgggcaccgtcccgacaccagccaggggccagccttgcacacagacctctcaggatggtcttgggccgtgcacacaagcatgagggcagcgcaccgcccccgcccctccttggctgtggggaggagccactggggcgtgagctctggtggcatcagcagcttttgtctgtgtgtgtctaggacaaggtcgtggcggagcctgtcagccgcctgctggagagcacactcaggagcagccacctgcccagcagggtcggagccctgcacggcatcctctatgtgctggagtgcgacctgctggacgatactgccaagcagctcatcccagtcatcagtgactatctcctctccaacctgaaagggatcgcccagtgagtgggagcctggctggggctaggacgggggtctcggaatgagctgcgaaggaagcagcatcaccctctccaagtgcccaggtccctggccagatggcaggcaggtgtcagtgggaacccaggtgggcgccatggctgaggttggtgagacgcaagggcacaggtgtgtcctagaggcttcctcgggcacccccagtgagctagagctcctgcctctgctgctgtctcatgtggcgctgagcacatttccccatgtgcccattcctgactctgctcgcgaggccagcggttctcattctctgctctcagaaccctctcctcattacccaggccagcctcctctctgcaccttccccgccctggcccagcacctccctcctgtttccactgtgactccgacctcactttatcttaaagctgctgggcggcaggttctgcacagatgtgtccttgacaaagcacggctggtgccacaaccccttaacgagcaagtcaagctcttcacaacgatgtcttgtgagtgcggagggctctgtgacaccctggtctcacctccgctctcccgaagtcgcagaggctttagcagagatgggcccagcctctctgagtcacaggctttagagctgtctgtagagggagggtagaatttcatcagccacccacatgggggagttgagggcaagaatttggagcaaagatgggaaaggggctgggaagaatggccagtgatcccctttgacaagtgggcaggagatgggggccgggtcaaagttgagtggaagacttggagggagatgggaagatctctgtaggcacagttcagacaggagggaggtgtgagccagggcactggctggtggctgtctggcaggatttgggacatcctggagcagggacagtggctcaacaggggccattgccctcatccaggccagagtggcacaagcttgtggggaggcccttctcgtctgtcatccttgctgggcggtgggtgctgtgctagcaggacgcaggacaggcggacagctggcaactgtctctgcatccctggagcctggcatagggcaagtcacacgggggacacaggcctgcaaatcaggcacatgcgttggtgcagcgaggtgattttggggggcagccccacaacaggccccaggcacaggccaaagccctggctgtgctggcgtgttgggccgtctatggctcttgctgtgggcatggaggactcaggaaaggagagttgaggtggcccaggagttgcgtttgggatgcagagagcttgtggcatccaggtagaaatggtgtgtggggctggcctcagtgccatgggcacgggctgtgtcacatgcctccgaggtagaggtgggaccacgtggtgatggatataagcatcactgggcacatttctgtgggtggaggggggcatcttactggctcctctgttcacagtggccactcattcagtccctggctaccgggtccccattgtgccatggggaaggcaggtgctgtcgggggatcacacaaggcagcacgtcatggtggaatgtgccacgaaggaaaagcacagggcactcaggaagtagaggggactggcctggggtgtgggaatccagggcctctttgagggacagagagaggaagtctgtggtggccagtatggaggtggccacaggggaggctgggccaggccgagagggcagggcgtggaggaggtagacgggctcagctatccagggaggggtcgagcagaggctgaagggtcaggccaggttacaggggcctggggagccacacagggtaggtgcttccgggagccagcctggcccgcagctcttcactcccgcgtggggccgggcatgctgcgaagccctctctacgttggatgggggcggctgagcctggctgctgtctcccgttttcagctgcgtgaacattcacagccagcagcacgtactggtcatgtgtgccactgcgttttacctgattgagaactatcctctggacgtagggccagaattttcagcatcaataatacaggtgagtgggccctggctgtcttcctctgcacacggggagtgggcttcccttctcttttccttgcgggatcataccagtgggccagttttgacttggtggggaggaggcatgaacacctgagaccatgcagcgacagaaacctttctccctgtgcagatgtgtggggtgatgctgtccggaagtgaggagtccaccccctctatcatttaccactgtgccctcagaggcctggagcgcctcctgctctctgagcagctctcccgcctggatgcagaatccctggtcaagctgagtgtggacagagtgaacgtgcacagcccgcaccgcgccatggcggctctgggcttgatgctcacctgcatgtacacaggtgagcaggtacacagtgcccgcaaggccagcccaagtcctgttcaagggagacaggagcatgctcgctcaaggaacctagactaggtgtcctctgatttgacacttttagtgttgccccaagctggccccatcaccttgcaagagaggctctggagcccccagggctggagtacctggtcagggttgaccacccctctggtcactcatcccatgtggctgagctgtgctgggtcctgggctagcgaggggctcacatcacctgctgtcaggtcttctccagtgattcattggactcctgtgtacaaagcactatctacagagcctgttgggttgtatagatgtaaccttcgtactgaacacttttattacaggaaaggagaaagtcagtccgggtagaacttcagaccctaatcctgcagccccagacagcgagtcggtgattgttgctatggagcgggtgtctgttctttttgataggtaagaaacgaagccccatccctcagccgttagcttccctagaattttggcctgaagctgagcgtttgtgtgtgttggctgatcccctggcgctgttgctggagtcccgccagtgattcctgaccacagcctgaccgtgggctgccttggctcagggttccactggcgagctggtggtccttggaccccagcgctcaggtgtagtgttgaccagttccaaggttgtcccagcgcctgcccatctctcctgagggctcaggcaccgcacctggccgtgtggggtatggcagggggcaggaatgaccagtctctgggagggtgcggcagaagcctgcgcagtgatgaggagttggctcagcctggctgcctgtcgtgagaggggagcccacgggggtctgtgggagggggtccatggtgcctgtgagcagggtgaggggcagcagcaggaggaggaaggtgaaacccacacatgcatctttgagacccgtgtggtcagtggcttctcctcgctacccctccgccccactgctgtgcgtgaattggtgttgagaattggcttcgctcccctgctctggaagtgggttaggagcttcgtagggctttttctcaaggacaaggctccctgattgctctcaggcctcagtcctggcgacatggcggatctggggcgttgttgtgctgccttgcctgtgctctccaatcagggtgtcccagtcctggcgacatggcggatctggggcgttgttgcactgccttgcctgtgctctccaatcagggtgtccagtggggagccatttggcttttctcaagagcatactcaggtggactttgctctattctttggccagatgaggtgttctgaacagctgagcctgtgcttgtctgttttcatgtttttttttttttttgagatggagttttgcccttgtcacccaggctggagtgcaatggcgcgatctcggctcactgcaacctccacctcccgggttcaagcgattctcctgcctcagcctcccaagtagctgggattacaggcacgtgccaccacgcccagctaatttttgtgtttttagtagagacagtgcttcaccgtgttggccgaactggtctcgaacttctgaactcaagtgatccaccctcctcggcctcccaaagtgctgggattgcaggcatgagccaccgtgcctggcccccatgtcgattttaaaacgcacctctgcatcattcttcagttcccacatgctcactgagcaccaccacagctggcagacggacacagggaggcgccacgaccagtcctggccttcaaggggcttgtggtctagtggacccagtgctaggtggcgagtgctccagagagcgtggtgtatgccttccgctctaccgccctccagacgccgcagggaggcaccttggagctgaccacagatctccctccgtggagcactgtcttcagcgcagccgccatgccactgctgggcgagggtctgcgggcgggtagagccaggagcacctctgagaaagtgcactgccgtttcttggctgcttcctgtgcatctcagttacacacagctggcatgtgtgcactgatgagacaggaacatgatggttgcttttcagcactaaaaaggatactgctcagggggcgtgtttcaggatctggttagggaaaaagcagcgagagcacagatggggccctgtttggtaacaagaaaaaagtcccggttgacaacagtgctacaaagtgttagaacacatagaaatgtttatggagcatttggatgtggaaagcagcaaaaacataatgagaaggggttcttttgttaggatttttaaaaatctcttttgtaacatccttccggctgcaccatttctgcatattcttttatgtagctttcagactcttaggatttctggtcactgcagggcgtgggagccagacagagcctatgcctagcagcctgtcttcacgagctggacagaggaggagctggggttttgcctttttagcctcaaatttcatactccagttgcttaggctctgactttccccacttggaaagtccctcacggccaagggtacctcccagccctgatttcacatcagcattttccccagagccaaggccctccgcgggcaggtggggcagctgtgggagctggtgccaggctctgacctgtgtccctcctcccaggatcaggaaaggctttccttgtgaagccagagtggtggcgaggatcctgccccagtttctagacgacttcttcccaccccaggacatcatgaacaaagtcatcggagagtttctgtccaaccagcagccatacccccagttcatggccaccgtggtgtataaggtgaggttgcatgtgggatggggatggagtggggaagcctggaggtggaattgaccccgacttgccagcagattcgccagaagaacccagctcctcccctttaaagcagcaatgcctctggcccccaccccacccccaccacccgggcacagcaggtgcttcccgccccccagccctgacactcaggcgcccgcttgctcctggcaggtgtttcagactctgcacagcaccgggcagtcatccatggtccgggactgggtcatgctgtccctctccaacttcacacagaggaccccagtcgccatggccacatggagcctctcctgcttcttcgtcagcgcgtccaccagcccatgggttgcggcgatgtatcctctctgggtccctggtgctggccccgtttccctcgtcaacaccgaggctcatgtttcatgataaagttttgaaacctaacctttgcaaaagccccacagatgccaaggtgacaggccctcagccccagggaagtacaatgctgacagggatacagaaaggagcacatccagacatttgctgaccagggcctctcagaggggcccgtgtatggcagaagggtcgaagctgctaaggggcccttctgtggagggcctgggtgaggggagcgagggtgggcggcggtctctgcagacctcccgcccactcgcgggctctgtgtggctgggcttctcctgacactgcttctcattagctttggtcattgtgcctcgatcaccctctcggggaaaggcttaagtaaagatccagttcccacccccagatgctggctgccaggagtttccctttccacagccctcccccaagacagaccacaagagcctccgagcagcacggttgtcctggtgctgacagcacagcctcgcccagtgtgcctggcgtggctctgcccgcactgtactggagcagggctcgtgggggccagcaggacagcaggagcatcggccaccagcgctacacaggagccaggccaggtgagtgctgccgagtgggtgcctgcctgcaggcctcctgcttccttggccagctctgcccagctcacttctgccctgctggccttccagcagggtgtccagccagccaagggttgcaggaatgaaggtggaggcgctgctgcagctggagccatccaggtagcccttccggggctctgctggctctccaggctccctgggccccttcgtaggctgtttcaggagaggagctcccaggtgaggacagggaggcagcattcccctcatttgccggcctttttccttaactcctgcaccagcctcccacatgtcatcagcaggatgggaaagctggagcaggtggacgtcaaccttttctgcctggttgccacagacttttacagacaccagatagaggaggagctcgaccgcagggccttccagtctgtgtttgaggtggttgcagctccaggaagcccatatcaccggctgctgacttgtttacgaaatgtccacaaggtcaccacctgctgagcgccatggtgggagagactgtgaggcggcagctggggctggagcctccagaaatctgcgccctgtgccctgcctccaccgagccagcttggtccctgtgggcttccgcacatgccgcgggcggccaggcaacgtgcgtgtctctgccatatggcagaagtgctctttgtggtacagtggccaggcaaggagtatctgcagtcccggtggggctgagcctgaggccttccggagagcaggagcagctgtgctgcacgccatgtgggtgaccaggtcctttctcctgatgctcacctgttgggtgttgccaggctgcagctgctcttgcatctgggccggaagtcctccctcctgcaggctggctgtgggcccctctgctgtcctgcagtagaaggtgccgtgagcaggctttgggaacactggcctgtgtcttcctggtggggtgtgcatgccacgccctgtgtctgtatgcacagatgccatggcatgtgctgggccagtggctgggggtgctagacacccagcaccattctcccttctctcttttcttctcaggatttaaaatttaattatatcagtaaagagattaattttaacgtaactctttctatgcccgtgtaaagtatgtgaattgcaaggcctgtgctgcatgcgacagtgttcggggaggtgggcagggcccctggccacgctccctctcctgtagccactggcatagccttcctgagcacccgctgacatttccgttgtacatgttcctgtttatgcattcacaaggtgactgggatgtagagaggcgctagtgtgcaggtggccacagcaggactaaggacaggcccccactgtcctaggggcatgctcgcctgcagcccctccttcttgggcacagacaactgttgttctccacccacattagggacagcagcctccctatcagctgagaaggccagccctccctggctgtgagcagcctccgctgtgtccagagacatgggcctcccactcctgttccttgctagccctggggcggtgtctgcccaggagctggctggccggtgatgggatctgccgttccatggatgcatgccccaagggtgtcactgagctgtgttttgtctgagcctctcttggtcaacagcaaagcttggcgtcttggcactgttagtgacagagcctggcatcccttctgcccccgttccagctgacatcttgcacggggaccccttttagtcaggagagtgcagatctgtgctcattggagactgccccactgccctgtcagagccgccactcctatccccaggccaggtccctggaccagcctcttgtttgcaggcccagaggagccaagtcattaaaatggaagtggattctggatggccggctgctgctgacataggagctggatttgggagctctgagatggggcaggagctctgcttcctcagcccttgaggcgagccaggcgaggttggcgactgtcatgtggcttggtttgctcatgcctgttgatgttttgggtattgaatatggtaagtggaggaaatgcttttctggagtctgtgcaggtgctgccttgagaccctcaagcttccacctgtccctctcctatgtggcagctgaggagcagctgacatgtggacttgtgtgctgcccacatacatgagggggcgctgaaagggagcccctgctcaaagggagcccctcctctgagcagcctttgacaggcctgtatgaggcttttcccaccagctcccaacagaggcctcccccagccaggaccacctcgtcctcgtggcagggcagcaggagcggtagaaaggggtctgatgtttgaggaggcccttaagggaagctactgaattttaacaagaaagccaccattcttccgtattggttgggggctcctgtttctcatcctagcttcttcctggaaagcctgctagaagctttgggaatgaggggaaagttctcagaaccgttgctgctccccacccacctcccctgcagtaagttatgtcaacagctcggagacagaagtatcacaggccagatgttgttctgctagatgtttacatttgtaagaaataacactgtgaatgtaaaacggagccattccccttggaatgcatatcgctgggctcaacacagagtttgtcttccttttgtttacgacgtgatctaaaacagtccttagcaaggggctcagaacaccccgctctggcagtgggtgtcccccactcccaaaggcctgcctgtgtgctccagagatgaatatgagctcattagtaaaatgactttacccatgcgtaagtcaagtacacgtgcacgtgcatatggacacatctgtagttttatacacgcacatctcaagacagagatgcatggcctccaagagtgcccgtgtcggttcttcctggaagttgactttcctcagacctgccaggtaaagttagctgtgtgacgggcgtccaggcgcggggcttggtcagagcagggctcattcatggctcactaggatcccaccggagaaaacggtctccatatcaactctgccgaagggaggaagactttgtcgcgttcctaaaaaacctatggcaagcaccaatcatattatccaaattgtgttgaaaatgtgattaatttggttgtcaagttttgggggtgagctgcggggagactgcttttgttttgctgctggtaatatcaggaaagactttaatgaaaccagggtagaattgtttggcaatgcactgaagcgcgtttctgtcccaaaacgtgcctcccttccgctgcgggcccagctgagtctgtgtaggtgacgtttccggctgccaagcgctctttgttactgtccacccccatttctgccagcacacgtgtcctttcaggaggaaaatgtgaagctgaaacccctccagacacccagaatgtagcatctgagaaggccctgtgccctaaaggacacccccgcccccaccttcatggaggggtcattccagagccctcggagccgatgaacagctcgtcctcttggagctgagctgagccccccacggagctcgggacggatagtaaacagcaataactcggtctgtggctgcctggcaggtggaagttcctccccctgaggggcggagtgaggttagttctgtgtgtctgtggggtggagtcagcctgctcctgctacctgtgagcatcctgcccagcagacatcctcacccggctttgtccctccccacttcctccctctgcggggaggacccaggaccacagctgctggccagggtaggcttggagctgtgctccggaggggccacctgtgggagcgagaagaaggaagatcttgagagctgccgaggcaccctggagagctcaggatggtccaggcgagaagaggacactcgctcgccaggcctgggcctcctgggaaggagggagccgctcagagcgccgcatgacaactgaaggcaacctggaaggttcagaggccactcttcccccgtgtgcctgtcacgctctggtgcagtccaaggaacgccttcccctcagttgtttccaaaagcagagtctcccgctgcaatctgggtggtgattgccagccttggaggattgtggccaacgtggacctgcctacggagggtgggctctgacccacgtggggcctccttgtccaggtctcattgctttgtgctgtggtcagagggactgtcagctgagcctgagctcccctggagccagcagggctgtgatgggcgagtcccggagccccacccagacctgactgcttctgagagcaaagggaaggactgacgagagatgtatatttaatttttttaactgctgcaaacattgtacatccaaattaaaggaaaaacattgaaaccatcagttgttgctgtgtgaggcttgctttacttcatgagaacctagaccttgctgagctggagtcttaggaaactgtctcctaagtgcttatccagcaggggcagaaactgtcccaccagctaacatctgacattacggagggtcccgcaggcagctgccagcaaggacaagccctgtgttttctgtagccagggatgaggaagtggccccaggggcctggctgggtgctgcttcaagggccttcgcaaaccacagtacaggtggtcttcctgcactgcagatgggagctgtgggagctgctggatccttcatggtcaagtgacatcataagcttatatgacacacacaagcctcaggacttggcccatggcactggagcaggtcatcaggcccagcagactagagctgtgttctcacagggcccatgacccttctagctccttggccattgaaacctgtgtccctgacccagctgctcccaggtaccccccaaagcagctggcacatcccacctctggtgtggcctgggctgctgtgtgtccgcagggcctgccccgtctgttctagcttgtttctcctgtctgaaccagcgcctactccaagaaggctctgctcagcccagcggggatgcttctaagctcggcccagcctctgggaagccttggtggtcggtggtgtagtcatcctgggatgcagaacgaaaacctgcaagaacaaaactgtggcttcgtctggtgcagggtatttagttactgtttgctgaggtcctgtctggttctggcgaatgggcaggggtcgcccacccattctttccctgctctgctgtccgtgccaggagagacgggggcctgttggccaagggggcagctcctgctgcctgctgtccttaggcacgtgcagggaccccctttctctgagcaggatggggatcagtctgccagagggatgtggtggacaggcccagccgggtaaaaaattcccccagttgctcaaagcatttggggcggggcatgccacttgagctccttaaatctgtctcataggtgacaccgctccagggcgccccaggggcttctcccttcagagctaccaaagttctggtcacttcagaaaaatggagcacccccttctccctggtccagatgtggacagccagacccttggcacacctagcacacctggcatggctggtaatttcagaaagaaaaggggccggggtccagtgggaagcagtggcgaacccctcatgcgtgggctttgcgatccctccccctgccacggcagagctgccctcagcacagccttcctcttcctcatcggagagcacaccctgtccccttgccggggctgtgctctgtgcctgcagtggtatttggttttggctgctactggctttgttccaaagaggatctggaagtcgcttcccctgtgtggagcgtggagcactgtgagtcagatgagggaagtagccagggggaggtgagtacccggcggagccgccacagaaaggactgggtagggggccttgcctccacgtgatgtgacacggccagccgaggacagaggaagccccgttcctgggggtgtggggtgcacccctcagggaagcctgcagtggggcccaaggaaaggcgttctctgcgagcccacgagtctgctctgtgggcaccgtgacaatgcccgtgggcagaggtgggcccggccttgtgtcgtcaccaggacctcttttgggaaaccatgtgggcatcccttgcgggtcccccaggttctgcagtcccagcggcctggctgcctgttgggcacatggcttgagccgcccagagggcccagccctgttggcagccacatcctctggaggccctgccggtggggctggctttctctaccccacaccaggcctccaagtatactggtcgggggtgtctgggccctggg

SEQ ID NO: 5 - DNA, 10295 bp, Rattus norvegicus
gcactcgccgcgagggttgccgggacgggcccaagatggctgggagctttggttccgcttcggtctacctcgtagagccccattcattaccttgctgctaagtggcgctgcgtagtgcgaataggctccaagccttcagggtctgtcctgtcgggcaggaggccgtcatggcaaccctggaaaaactgatgaaggctttcgagtcgctcaagtcgttccagcagcaacagcagcagcagcagccgccgccgcaggcgccgccaccaccgccgccgccgccgcctcaaccccctcagccgccgcctcaggggcagccgccgccaccaccgccgctgccaggtccggccgaggagccgctgcaccgaccaaagaaggaactctcagccaccaagaaggaccgtgtgaatcactgtctaacaatatgtgaaaacattgtggcacagtctctcagaaattctccagaatttcagaaactcttgggcattgctatggaactgtttctgctgtgcagcgacgatgcggagtcagacgtcagaatggtggctgatgagtgcctcaacaaagtcatcaaagctttgatggactctaatcttccaaggctacagttagaactctataaggaaattaaaaagaatggtgctcctcgaagtttgcgtgcagctctgtggaggtttgctgagctggctcacctggttcgacctcagaagtgcaggccttatctggtgaatcttcttccatgtttgacccgaacaagcaaacgaccggaggagtcagttcaggagactttggctgcagctgttcctaaaattatggcctcttttggcaatttcgcgaatgacaatgaaattaaggttctattgaaagctttcatagcaaatctgaagtcaagctctcccactgtgcggcggacagcagctgggtcagcagtgagtatctgccagcactctaggaggacacagtacttctacaactggctcctgaatgtgctcctaggtttgctggttcccatggaggaagaccaccccactctcctgatccttggtgtgttgctcacactgaggtgtctagtgcccttgctccagcagcaggtcaaggacacaagtctaaagggcagctttggggtaacacggaaagaaatggaagtctctccttctgcagagcagcttgtccaggtttatgaactgactttgcatcacacacagcaccaagaccataatgtggtgacaggggcattggagctcctgcagcagctcttccgtacccctccacctgagctgctgcaagcactgaccacaccaggagggctcgggcagctcactctggttcgagaggaagccgggggccgaggccgcagcgggagtatcgtggagcttttagctggagggggttcctcatgcagccctgttctctcaagaaagcaaaaaggcaaagtgctcttaggagaggaagaagccttggaggatgactcggagtccaggtcagatgtcagcagctcagcctttgcagcctctgtgaagagtgagattggtggagagctcgctgcttcttcttcgggtgtctccactcccggttctgtaggtcacgacatcatcactgagcagcctcgatcccagcacacacttcaagcagactctgtggatttgtcaggctgtgacttgaccagtgctgctactgatggagatgaggaagacatcttgagccacagctccagccagttcagtgctgttccatccgaccctgccatggacctgaatgatgggacccaggcctcctcacccatcagtgacagttctcagaccaccactgaaggacctgattcagctgtgactccttctgacagttctgaaattgtcttagatggtgctgacagccagtatttaggcgtgcagataggacagccacaggaggaagacgaggaggaagctgcaggtgttctttctggtgaagtctcagacgttttcagaaactcttctctggcccttcagcaggcacacttgttggaaagaatgggtcatagccggcagccttctgacagcagtgttgataagtttgtttcaaaagatgaggttgctgaagctggggacccagaaagcaagccttgccgaatcaaaggtgacataggacagcctaatgatgatgattctgctcctctggtacattgtgtccgtcttttatccgcttcctttttgttaactggcgaaaagaaagcactggttccagacagagatgtgagagtcagtgtgaaggccctggccctcagctgtattggtgcagctgtggcccttcatccagagtcgttcttcagcaaactctacaaagtacctctcagtaccatggaaagtactgaggaacagtatgtctctgacatcctgaactacatcgatcatggagaccctcaggtgcgaggagctactgccattctctgtgggacccttgtctactccatcctcagcaggtcccgtctccgtgttggtgactggctgggcaccatcagggccctgacaggaaatacattttctctggtggactgcattcctttactgcagaaaactttgaaggatgaatcttctgttacttgcaagttggcttgtacagctgtgaggcactgtgtcctgagtctttgcagcagcagctacagtgacttgggattacaactgcttattgacatgctgcctctgaagaacagctcctactggctggtgaggactgaactgctggaaactcttgcagagattgatttcaggctggtgagttttttggaggcaaaagcagaaagtttacaccgaggggctcatcattatacagggtttctaaaactacaagaacgagtactcaataatgtggtcatttatttgcttggagatgaagaccccagggttcgacatgttgctgcgacgacattgacaagacttgtcccaaagctgttttataagtgtgaccaaggacaggctgacccagtcgtggctgtagcaagagatcaaagtagtgtttacctgaagctcctcatgcatgagacccagccaccatcccacttctccgtcagcaccataaccagaatctatagaggctacagcttactaccaagtgtaacagatgtcaccatggaaaacaacctctcaagagtcgttgccgcagtttctcatgaactcattacgtcaactacacgggcactcacatttgggtgctgtgaagccttgtgtgttctttcagccgcctttccagtttgcacttggagtctaggatggcactgtggagtgcccccactgagtgcctctgatgagtccaggaagagctgcactgttgggatggcctccatgattctcaccttgctttcatcagcttggttcccactggatctctcagcccatcaggatgccttgattttggctggaaacttgctagcagcgagtgcccccaagtctctgagaagctcatgggcctcggaagaagaaggcagctcagcagccaccagacaggaggagatctggcctgccctgggggatcggactctggtgcccatggtggagcagcttttctcccacctgctgaaggtgatcaatatctgtgctcatgtcttggatgacgtgactcctggaccagcaatcaaggcagctttgccttctctcacaaaccccccttctctaagtcctattcgacggaaagggaaggagaaagagcccggagaacaaacatccactccgatgagtcccaagaaaggtggagaggccagtacagcctctcgacagtcagacacctcaggacctgtcacagcgagtaaatcatcttcacttgggagtttctaccatctcccttcctacctcagactgcatgatgtcctgaaagccactcacgccaactataaggtcaccttagatcttcagaacagcactgaaaagtttggggggttcctgcgctctgccttggacgtcctttctcagattctagagctggcgacactgcaggacattggaaagtgtgttgaagaggtccttggatacttgaaatcctgctttagtcgagaaccaatgatggcgactgtctgtgttcagcagctattgaagactctctttgggacaaacttagcctcacagtttgatggcttatcttccaaccccagcaagtctcagtgccgagcacagcgccttggctcttccagtgtgaggcccggcttatatcactactgcttcatggcaccatacacgcacttcacgcaggctttggctgatgccagcctgaggaacatggtacaggcggaccaggagcacgatgcctcagggtggtttgatgtactccagaaagtgtctgctcagttgaagacgaaccttacaagtgtcacaaagaaccgtgcagataagaacgctattcataaccacattaggttatttgagcctcttgttataaaagcattgaagcagtacaccacgacaacatcagtacaactgcagaagcaggttttggatttgctggcacagctggttcagctacgggtcaattactgtctactggattcagatcaggtgttcatcgggtttgtgctgaagcagtttgagtacattgaagtgggccagttcagggaatcagaggcaattattccaaatatatttttcttcctggtactattatcttatgagcgctaccattcaaaacagatcattggaattcctaaaatcatccagctgtgtgatggcatcatggccagtggaaggaaggctgtcacacatgctattcctgcgctgcagcccattgtccatgacctctttgtgttaagaggaacaaataaagctgatgcagggaaagagcttgaaacccagaaggaggtggtggtctcaatgctgttacgactcatccagtaccatcaggtgctagagatgttcatcctcgtcctgcagcagtgccacaaagagaatgaggacaagtggaaacggctctctcggcaggtcgcagacatcatcctgcccatgttagccaagcagcagatgcatattgactctcatgaagcccttggagtattaaataccttgtttgagattttggctccttcctccctacgtcctgtggacatgcttttgcggagtatgttcatcactccaagcacaatggcatctgtaagcactgtgcagctgtggatatctggaatcctagccattctgagggttctcatttcccagtcaaccgaagacattgttctttctcgtattcaggagctctccttctctccatatttaatttcctgtccagtaattaacaggttaagggatggagacagtaatccaacactaggagaacgcagtgaagggaaacaagtaaagaatttgccagaagatacattctcaaggtttctcttacagctggttggtattcttctggaagacattgttacaaaacagctcaaagtggacatgagtgaacagcagcatacattctattgccaagagctcggcacactgctcatgtgtctgatccacatattcaaatctggaatgttccggagaatcacagccgctgccactagactcttcaccagtgatggctgtgaaggcagcttctatactctagatagcctgaatgcacgggtgcgagccatggtgcccacacacccagctctggtactgctctggtgtcagatcctactgctcatcaaccacactgaccaccgatggtgggccgaggtgcagcagacgcccaagagacacagtctgtcctgcacgaagtcactaaacccccagatatctgctgaagaggattctggctcagcagctcagcttggaatgtgcaatagagaaatagtacgaagaggggcccttattctcttctgtgattatgtctgtcagaatctccatgactcagaacacttaacatggctcattgtgaatcacattcaagatctgatcagcttgtcccacgagcctccagttcaagactttattagtgccattcatcgtaattctgcagctagtggtctttttatccaggcaattcagtctcgctgtgaaaatctttcaactccaaccactctgaagaaaacacttcagtgcttggaaggcatccatctcagccagtctggtgctgtgctcacactgtatgtggacaggctactgggcacccctttccgtgcgctggctcgcatggtcgacaccctggcctgtcgccgagtagaaatgcttttggctgcaaatttacagagcagcatggcccagttgccagaggaggaactgaacagaatccaggaacacctccagaacactgggcttgcacaaagacaccaaaggctctattcactgctggacagattccgactctctactgtgcaggactcacttagccccttgcccccagtcacttcccaccctctggatggggatgggcacacatccctggaaacagtgaatccggacaaagactggtacctccagcttgtcagatcccagtgttggaccaggtcagattctgcactgctggaaggtgcagagctggtgaaccgtatccctgctgaagatatgagtgacttcatgatgagctcggagttcaacctaagccttttggctccctgcttaagccttggcatgagcgagattgctaatggccaaaagagtcccctttttgaagcggctcgtagggtgactctggaccgggtgaccaatgtggttcagcagctgcctgcagtccatcaagtcttccagcctttcctgcctacagaacccacagcctactggagcaagctgaatgatctctttggtgataccacatcataccagtctctgaccacacttgcccgtgccctggcacagtacctggtggtgctctccaaagtgcctgctcctttgcaccttcctcctgagaaggaggggcacacggtgaagtttgtggtaatgacacttgaggccctgtcatggcatttgatccatgagcagatcccactgagtctggacctccaagccggcctagactgctgctgcctggcactgcaggtgcctggcctctggggggtgctgtcctccccagagtacgtgactcatacttgctcccttatccactgtgtgcgattcatcctggaagccattgcagtacaacctggagaccaacttcttggtccggaaagcaggtcacatactccaagggctgtcagaaaggaggaagtagactcagatatacaaaacctcagtcacatcacttcggcctgcgagatggtggcagacatggtggaatccctgcagtcggtgctggccctgggccacaagaggaacagcaccctaccttcatttctcacagctgtgctgaagaacattgttgtcagtctggcccgcctccccctcgttaacagctatactcgtgtgcctcctctggtatggaaactcgggtggtcacccaagcctggaggggatttcggcacagtgtttcctgagatccctgtagagttcctccaggagaaggaggtcctcaaggagttcatctaccgcatcaacaccctagggtggaccagtcgtactcaattcgaagaaacttgggccaccctccttggtgtcctggtgactcagcccttggtgatggaacaggaagagagcccaccagaggaagacaccgaaaggacccagatccacgtcctggctgtacaggccatcacctctctagtgctcagcgcaatggctgtgcctgtggctggcaatccagctgtaagctgcttggagcaacagccccggaacaagccactgaaggctctcgataccagatttggaagaaagttgagcatgatcagagggattgtagaacaagaaatccaagagatggtttcccaaagagagaatactgccactcatcattctcaccaggcatgggatcctgtcccttctctgttaccagctactacaggtgctcttatcagccatgacaagctgctgctgcagatcaactcagagcgggagccaggcaacatgagctacaagctgggccaggtgtccatacactccgtgtggctggggaacaacatcacacccctgagagaggaggaatgggatgaggaggaggaggaagaagcggatgcccctgcgccaacatcaccacctgtgtctccagtcaattccagaaaacaccgtgctggggttgatattcactcctgttcgcagtttctgcttgaattatacagccgttggatcctgccatccagtgcagccagaaggacccctgtcatcctgatcagtgaagtggttcgatctcttcttgtggtgtcagacttattcactgaacgtacccagtttgaaatgatgtatctgacgctgacagaactacggagagtgcacccttcagaagatgagatcctcattcaatacctggtgcctgccacctgtaaggcagctgctgttcttggaatggacaaaactgtggcagagccggtcagccgcctactggagagcacactcaggagcacccacctgcccagccagatcggagccctgcatggcatcctctatgtgttggagtgtgacctcttggatgacactgtaaagcagctcattccagttgttagtgactatctgctgtccaacctcaaaggaatagcccactgcgtgaacattcacagccagcagcatgtgctggtgatgtgtgccactgcattctacctgatggaaaactaccctctggatgtggggccagaattctcagcatctgtgatacagatgtgtggagtaatgctgtctggaagtgaggagtccaccccctccatcatttaccactgtgccctccggggtctggaacggctcctgctgtctgagcagctctctcggctagacacggagtccttggtcaagctaagtgtggacagagtgaatgtacaaagcccacacagggccatggcagccctaggcctgatgcttacctgcatgtacacaggaaaggaaaaagccagtccaggcagagcttctgaccccagccctgctacccctgacagcgagtctgtgattgtagctatggagcgagtgtctgtgctctttgacaggatccgcaagggatttccctgtgaagccagggtcgtggcaaggatcctgcctcagtttctagatgacttctttccacctcaagatgtcatgaacaaagtcattggagagttcctgtccaaccagcagccatacccacagttcatggccactgtagtatacaaggtttttcagactctgcacagtgctgggcagtcatccatggtccgggactgggttatgctgtctctgtccaacttcacacaaagaactccagttgccatggccatgtggagcctctcctgcttccttgtcagtgcatctaccagcccatgggtttctgcaatccttccacacgtcatcagcaggatgggcaaactggagcaggtggatgtgaaccttttctgcctggttgccacagacttctacagacaccagatagaggaggaattcgaccgcagggctttccagtctgtgtttgaggtggtggcagcaccaggaagtccataccacaggctgcttgcttgtttgcaaaatgttcacaaggtcaccgcctgctgagtagtacctgtggaacaagaggctgagaggaggcaactgctgtggctacagcctccaggggcctgcaccaagcttctgctaaggctgccttggacgtgcaggcttccacttgtgtcaagtggacagccaggcaatggcaggagtgctttgcaatgagagctatgcagggaacatgcactatgttggggttgagcctgagtcctgggtcctggcatcactgcagctggtggcagtgctaggttgaccaggtgtttgtctttttcttagtgttgccctggccatagttgccaggttgcagctgccctggtatgtggaacagaatccgagctcttgtaagatggttctgagcccccctgtcccactgggctggagagctccctcccacatttacccagcaggtgtacctgccacaccagtgtctggacacaaagtgaatggtgtgggggctgggaactgggactgccaggtgtccagcatcattttccctttctctgttttcttctcaggagttaaaatttaattatatcagtaaagagattaattttaatgtaactcttcctatgcccgtgtaaagtgtgtgacttggcaaggcctgtgctgcatgtgacaaagtttatggaagtggatgcgccttctggccaccactctctctcctgtagctactcagtctagtcgggcaggtccctcatgtagccctcccaacaccctatggcacttgcacttcacacggctcctttttcttatgcattccatttgactagcaca

SEQ ID NO: 6-10 - skipped (5 entries)

SEQ ID NO: 11 - DNA, 20 bp, Artificial sequence
  Primer
ctccgtccggtagacatgct

SEQ ID NO: 12 - DNA, 23 bp, Artificial sequence
  Primer
ggaaatcagaaccctcaaaatgg

SEQ ID NO: 13 - DNA, 29 bp, Artificial sequence
  Probe
tgagcactgttcaactgtggatatcggga

SEQ ID NO: 14 - DNA, 23 bp, Artificial sequence
  Primer
gaggaagtagatccaaacacaca

SEQ ID NO: 15 - DNA, 21 bp, Artificial sequence
  Primer
gccgctattccttttatgacc

SEQ ID NO: 16 - DNA, 24 bp, Artificial sequence
  Probe
tccaccatttctgccaccatctca

SEQ ID NO: 17 - DNA, 20 bp, Artificial sequence
  Primer
acccttgcagagattgactt

SEQ ID NO: 18 - DNA, 19 bp, Artificial sequence
  Primer
agcactcgttcttgcagtt

SEQ ID NO: 19 - DNA, 24 bp, Artificial sequence
  Probe
tttgcctccaaaaagctcaccagc

SEQ ID NO: 20 - DNA, 15 bp, Artificial sequence
  Primer
tcgccgcttgctgca

SEQ ID NO: 21 - DNA, 17 bp, Artificial sequence
  Primer
atcggccgtgatgtcga

SEQ ID NO: 22 - DNA, 23 bp, Artificial sequence
  Probe
ccatggtcaaccccaccgtgttc

SEQ ID NO: 23-25 - skipped (3 entries)

SEQ ID NO: 26 - DNA, 17 bp, Artificial sequence
  Synthetic oligonucleotide
ggccagcatgattgaca

SEQ ID NO: 27 - DNA, 17 bp, Artificial sequence
  Synthetic oligonucleotide
cgccggccagcatgatt

SEQ ID NO: 28 - DNA, 17 bp, Artificial sequence
  Synthetic oligonucleotide
gccacgccggccagcat

SEQ ID NO: 29 - DNA, 17 bp, Artificial sequence
  Synthetic oligonucleotide
gcgccggcggaggcggg

SEQ ID NO: 30 - DNA, 17 bp, Artificial sequence
  Synthetic oligonucleotide
cgcgccggcggaggcgg

SEQ ID NO: 31 - DNA, 17 bp, Artificial sequence
  Synthetic oligonucleotide
gggccgcgccggcggag

SEQ ID NO: 32 - DNA, 17 bp, Artificial sequence
  Synthetic oligonucleotide
gctgcgccggcggaggc

SEQ ID NO: 33 - DNA, 17 bp, Artificial sequence
  Synthetic oligonucleotide
gctctgggccgcaggta

SEQ ID NO: 34 - DNA, 17 bp, Artificial sequence
  Synthetic oligonucleotide
ggaaggacttgagggac

SEQ ID NO: 35 - DNA, 17 bp, Artificial sequence
  Synthetic oligonucleotide
tgctggaaggacttgag

SEQ ID NO: 36 - DNA, 17 bp, Artificial sequence
  Synthetic oligonucleotide
ctgctgctggaaggact

SEQ ID NO: 37 - DNA, 17 bp, Artificial sequence
  Synthetic oligonucleotide
ggcggctgttgctgctg

SEQ ID NO: 38 - DNA, 17 bp, Artificial sequence
  Synthetic oligonucleotide
gcggcggtggcggctgt

SEQ ID NO: 39 - DNA, 17 bp, Artificial sequence
  Synthetic oligonucleotide
tgaggaggcggcggcgg

SEQ ID NO: 40 - DNA, 17 bp, Artificial sequence
  Synthetic oligonucleotide
aagctgaggaggcggcg

SEQ ID NO: 41 - DNA, 17 bp, Artificial sequence
  Synthetic oligonucleotide
gaggaagctgaggaggc

SEQ ID NO: 42 - DNA, 17 bp, Artificial sequence
  Synthetic oligonucleotide
ggctgaggaagctgagg

SEQ ID NO: 43 - DNA, 17 bp, Artificial sequence
  Synthetic oligonucleotide
cggcggctgaggaagct

SEQ ID NO: 44 - DNA, 17 bp, Artificial sequence
  Synthetic oligonucleotide
gcggcggcggctgagga

SEQ ID NO: 45 - DNA, 17 bp, Artificial sequence
  Synthetic oligonucleotide
gcctgcggcggcggctg

SEQ ID NO: 46 - DNA, 17 bp, Artificial sequence
  Synthetic oligonucleotide
ctgtgcctgcggcggcg

SEQ ID NO: 47 - DNA, 17 bp, Artificial sequence
  Synthetic oligonucleotide
gcggctgtgcctgcggc

SEQ ID NO: 48 - DNA, 17 bp, Artificial sequence
  Synthetic oligonucleotide
agcagcggctgtgcctg

SEQ ID NO: 49 - DNA, 17 bp, Artificial sequence
  Synthetic oligonucleotide
aggcagcagcggctgtg

SEQ ID NO: 50 - DNA, 17 bp, Artificial sequence
  Synthetic oligonucleotide
gctgaggcagcagcggc

SEQ ID NO: 51 - DNA, 17 bp, Artificial sequence
  Synthetic oligonucleotide
tgcggctgaggcagcag

SEQ ID NO: 52 - DNA, 17 bp, Artificial sequence
  Synthetic oligonucleotide
cggctgcggctgaggca

SEQ ID NO: 53 - DNA, 17 bp, Artificial sequence
  Synthetic oligonucleotide
agccacagccgggccgg

SEQ ID NO: 54 - DNA, 17 bp, Artificial sequence
  Synthetic oligonucleotide
cctcagccacagccggg

SEQ ID NO: 55 - DNA, 17 bp, Artificial sequence
  Synthetic oligonucleotide
ggagctgcagcgggccc

SEQ ID NO: 56 - DNA, 17 bp, Artificial sequence
  Synthetic oligonucleotide
agcctgggacccgccgg

SEQ ID NO: 57 - DNA, 17 bp, Artificial sequence
  Synthetic oligonucleotide
tagcctgggacccgccg

SEQ ID NO: 58 - DNA, 17 bp, Artificial sequence
  Synthetic oligonucleotide
gtagcctgggacccgcc

SEQ ID NO: 59 - DNA, 17 bp, Artificial sequence
  Synthetic oligonucleotide
cgtagcctgggacccgc

SEQ ID NO: 60 - DNA, 17 bp, Artificial sequence
  Synthetic oligonucleotide
ccgtagcctgggacccg

SEQ ID NO: 61 - DNA, 17 bp, Artificial sequence
  Synthetic oligonucleotide
gccgtagcctgggaccc

SEQ ID NO: 62 - DNA, 17 bp, Artificial sequence
  Synthetic oligonucleotide
cgccgtagcctgggacc

SEQ ID NO: 63 - DNA, 17 bp, Artificial sequence
  Synthetic oligonucleotide
ccgccgtagcctgggac

SEQ ID NO: 64 - DNA, 17 bp, Artificial sequence
  Synthetic oligonucleotide
cccgccgtagcctggga

SEQ ID NO: 65 - DNA, 17 bp, Artificial sequence
  Synthetic oligonucleotide
ccccgccgtagcctggg

SEQ ID NO: 66 - DNA, 17 bp, Artificial sequence
  Synthetic oligonucleotide
tccccgccgtagcctgg

SEQ ID NO: 67 - DNA, 17 bp, Artificial sequence
  Synthetic oligonucleotide
atccccgccgtagcctg

SEQ ID NO: 68 - DNA, 17 bp, Artificial sequence
  Synthetic oligonucleotide
catccccgccgtagcct

SEQ ID NO: 69 - DNA, 17 bp, Artificial sequence
  Synthetic oligonucleotide
gccatccccgccgtagc

SEQ ID NO: 70 - DNA, 17 bp, Artificial sequence
  Synthetic oligonucleotide
cgccatccccgccgtag

SEQ ID NO: 71 - DNA, 17 bp, Artificial sequence
  Synthetic oligonucleotide
ccgccatccccgccgta

SEQ ID NO: 72 - DNA, 17 bp, Artificial sequence
  Synthetic oligonucleotide
accgccatccccgccgt

SEQ ID NO: 73 - DNA, 17 bp, Artificial sequence
  Synthetic oligonucleotide
taccgccatccccgccg

SEQ ID NO: 74 - DNA, 17 bp, Artificial sequence
  Synthetic oligonucleotide
ttaccgccatccccgcc

SEQ ID NO: 75 - DNA, 17 bp, Artificial sequence
  Synthetic oligonucleotide
gttaccgccatccccgc

SEQ ID NO: 76 - DNA, 17 bp, Artificial sequence
  Synthetic oligonucleotide
ggttaccgccatccccg

SEQ ID NO: 77 - DNA, 17 bp, Artificial sequence
  Synthetic oligonucleotide
gggttaccgccatcccc

SEQ ID NO: 78 - DNA, 17 bp, Artificial sequence
  Synthetic oligonucleotide
agggttaccgccatccc

SEQ ID NO: 79 - DNA, 17 bp, Artificial sequence
  Synthetic oligonucleotide
cagggttaccgccatcc

SEQ ID NO: 80 - DNA, 17 bp, Artificial sequence
  Synthetic oligonucleotide
gcagggttaccgccatc

SEQ ID NO: 81 - DNA, 17 bp, Artificial sequence
  Synthetic oligonucleotide
tgcagggttaccgccat

SEQ ID NO: 82 - DNA, 17 bp, Artificial sequence
  Synthetic oligonucleotide
gctgcagggttaccgcc

SEQ ID NO: 83 - DNA, 17 bp, Artificial sequence
  Synthetic oligonucleotide
ggctgcagggttaccgc

SEQ ID NO: 84 - DNA, 17 bp, Artificial sequence
  Synthetic oligonucleotide
aggctgcagggttaccg

SEQ ID NO: 85 - DNA, 17 bp, Artificial sequence
  Synthetic oligonucleotide
gcgggtgtccctcatgg

SEQ ID NO: 86 - DNA, 17 bp, Artificial sequence
  Synthetic oligonucleotide
ggacaggccccaacaag

SEQ ID NO: 87 - DNA, 17 bp, Artificial sequence
  Synthetic oligonucleotide
tcaggacaggccccaac

SEQ ID NO: 88 - DNA, 17 bp, Artificial sequence
  Synthetic oligonucleotide
aattcaggacaggcccc

SEQ ID NO: 89 - DNA, 17 bp, Artificial sequence
  Synthetic oligonucleotide
gtgaattcaggacaggc

SEQ ID NO: 90 - DNA, 17 bp, Artificial sequence
  Synthetic oligonucleotide
tcggtgaattcaggaca

SEQ ID NO: 91 - DNA, 17 bp, Artificial sequence
  Synthetic oligonucleotide
ccctcggtgaattcagg

SEQ ID NO: 92 - DNA, 17 bp, Artificial sequence
  Synthetic oligonucleotide
ctcccctcggtgaattc

SEQ ID NO: 93 - DNA, 17 bp, Artificial sequence
  Synthetic oligonucleotide
tgactcccctcggtgaa

SEQ ID NO: 94 - DNA, 17 bp, Artificial sequence
  Synthetic oligonucleotide
ccgtgactcccctcggt

SEQ ID NO: 95 - DNA, 17 bp, Artificial sequence
  Synthetic oligonucleotide
aggccgtgactcccctc

SEQ ID NO: 96 - DNA, 17 bp, Artificial sequence
  Synthetic oligonucleotide
ctgaggccgtgactccc

SEQ ID NO: 97 - DNA, 17 bp, Artificial sequence
  Synthetic oligonucleotide
gggctgaggccgtgact

SEQ ID NO: 98 - DNA, 17 bp, Artificial sequence
  Synthetic oligonucleotide
agagggctgaggccgtg

SEQ ID NO: 99 - DNA, 17 bp, Artificial sequence
  Synthetic oligonucleotide
gcgagagggctgaggcc

SEQ ID NO: 100 - DNA, 17 bp, Artificial sequence
  Synthetic oligonucleotide
ctgcgaagggcgagagg

SEQ ID NO: 101 - DNA, 17 bp, Artificial sequence
  Synthetic oligonucleotide
atcctgcgaagggcgag

SEQ ID NO: 102 - DNA, 17 bp, Artificial sequence
  Synthetic oligonucleotide
cgcatcctgcgaagggc

SEQ ID NO: 103 - DNA, 17 bp, Artificial sequence
  Synthetic oligonucleotide
cttcgcatcctgcgaag

SEQ ID NO: 104 - DNA, 17 bp, Artificial sequence
  Synthetic oligonucleotide
actcttcgcatcctgcg

SEQ ID NO: 105 - DNA, 17 bp, Artificial sequence
  Synthetic oligonucleotide
ccaactcttcgcatcct

SEQ ID NO: 106 - DNA, 17 bp, Artificial sequence
  Synthetic oligonucleotide
gccccaactcttcgcat

SEQ ID NO: 107 - DNA, 17 bp, Artificial sequence
  Synthetic oligonucleotide
ctcgccccaactcttcg

SEQ ID NO: 108 - DNA, 17 bp, Artificial sequence
  Synthetic oligonucleotide
gttctcgccccaactct

SEQ ID NO: 109 - DNA, 17 bp, Artificial sequence
  Synthetic oligonucleotide
caagttctcgccccaac

SEQ ID NO: 110 - DNA, 17 bp, Artificial sequence
  Synthetic oligonucleotide
aaacaagttctcgcccc

SEQ ID NO: 111 - DNA, 17 bp, Artificial sequence
  Synthetic oligonucleotide
aagaaacaagttctcgc

SEQ ID NO: 112 - DNA, 17 bp, Artificial sequence
  Synthetic oligonucleotide
cgcaaataaaaagaaac

SEQ ID NO: 113 - DNA, 17 bp, Artificial sequence
  Synthetic oligonucleotide
tctcgcaaataaaaaga

SEQ ID NO: 114 - DNA, 17 bp, Artificial sequence
  Synthetic oligonucleotide
gtttctcgcaaataaaa

SEQ ID NO: 115 - DNA, 17 bp, Artificial sequence
  Synthetic oligonucleotide
ctggtttctcgcaaata

SEQ ID NO: 116 - DNA, 17 bp, Artificial sequence
  Synthetic oligonucleotide
gccctggtttctcgcaa

SEQ ID NO: 117 - DNA, 17 bp, Artificial sequence
  Synthetic oligonucleotide
cccgccctggtttctcg

SEQ ID NO: 118 - DNA, 17 bp, Artificial sequence
  Synthetic oligonucleotide
acccccgccctggtttc

SEQ ID NO: 119 - DNA, 17 bp, Artificial sequence
  Synthetic oligonucleotide
agaacccccgccctggt

SEQ ID NO: 120 - DNA, 17 bp, Artificial sequence
  Synthetic oligonucleotide
aaaagaacccccgccct

SEQ ID NO: 121 - DNA, 17 bp, Artificial sequence
  Synthetic oligonucleotide
gttaaaagaacccccgc

SEQ ID NO: 122 - DNA, 17 bp, Artificial sequence
  Synthetic oligonucleotide
gcagttaaaagaacccc

SEQ ID NO: 123 - DNA, 17 bp, Artificial sequence
  Synthetic oligonucleotide
aacgcagttaaaagaac

SEQ ID NO: 124 - DNA, 17 bp, Artificial sequence
  Synthetic oligonucleotide
cacaacgcagttaaaag

SEQ ID NO: 125 - DNA, 17 bp, Artificial sequence
  Synthetic oligonucleotide
cttcacaacgcagttaa

SEQ ID NO: 126 - DNA, 17 bp, Artificial sequence
  Synthetic oligonucleotide
tctcttcacaacgcagt

SEQ ID NO: 127 - DNA, 17 bp, Artificial sequence
  Synthetic oligonucleotide
agttctcttcacaacgc

SEQ ID NO: 128 - DNA, 17 bp, Artificial sequence
  Synthetic oligonucleotide
ccaagttctcttcacaa

SEQ ID NO: 129 - DNA, 17 bp, Artificial sequence
  Synthetic oligonucleotide
cctccaagttctcttca

SEQ ID NO: 130 - DNA, 17 bp, Artificial sequence
  Synthetic oligonucleotide
gctcctccaagttctct

SEQ ID NO: 131 - DNA, 17 bp, Artificial sequence
  Synthetic oligonucleotide
tcggctcctccaagttc

SEQ ID NO: 132 - DNA, 17 bp, Artificial sequence
  Synthetic oligonucleotide
atctcggctcctccaag

SEQ ID NO: 133 - DNA, 17 bp, Artificial sequence
  Synthetic oligonucleotide
caaatctcggctcctcc

SEQ ID NO: 134 - DNA, 17 bp, Artificial sequence
  Synthetic oligonucleotide
gagcaaatctcggctcc

SEQ ID NO: 135 - DNA, 17 bp, Artificial sequence
  Synthetic oligonucleotide
actgagcaaatctcggc

SEQ ID NO: 136 - DNA, 17 bp, Artificial sequence
  Synthetic oligonucleotide
ggcactgagcaaatctc

SEQ ID NO: 137 - DNA, 17 bp, Artificial sequence
  Synthetic oligonucleotide
agtggcactgagcaaat

SEQ ID NO: 138 - DNA, 17 bp, Artificial sequence
  Synthetic oligonucleotide
ggaagtggcactgagca

SEQ ID NO: 139 - DNA, 17 bp, Artificial sequence
  Synthetic oligonucleotide
gagggaagtggcactga

SEQ ID NO: 140 - DNA, 17 bp, Artificial sequence
  Synthetic oligonucleotide
gaagagggaagtggcac

SEQ ID NO: 141 - DNA, 17 bp, Artificial sequence
  Synthetic oligonucleotide
ctagaagagggaagtgg

SEQ ID NO: 142 - DNA, 17 bp, Artificial sequence
  Synthetic oligonucleotide
agactagaagagggaag

SEQ ID NO: 143 - DNA, 17 bp, Artificial sequence
  Synthetic oligonucleotide
ctcagactagaagaggg

SEQ ID NO: 144 - DNA, 17 bp, Artificial sequence
  Synthetic oligonucleotide
cctctcagactagaaga

SEQ ID NO: 145 - DNA, 17 bp, Artificial sequence
  Synthetic oligonucleotide
ttccctctcagactaga

SEQ ID NO: 146 - DNA, 17 bp, Artificial sequence
  Synthetic oligonucleotide
ctcttccctctcagact

SEQ ID NO: 147 - DNA, 17 bp, Artificial sequence
  Synthetic oligonucleotide
gccctcttccctctcag

SEQ ID NO: 148 - DNA, 17 bp, Artificial sequence
  Synthetic oligonucleotide
cgcccccagccctcttc

SEQ ID NO: 149 - DNA, 17 bp, Artificial sequence
  Synthetic oligonucleotide
ccgcgcccccagccctc

SEQ ID NO: 150 - DNA, 17 bp, Artificial sequence
  Synthetic oligonucleotide
gtcccgcgcccccagcc

SEQ ID NO: 151 - DNA, 17 bp, Artificial sequence
  Synthetic oligonucleotide
agtgtcccgcgccccca

SEQ ID NO: 152 - DNA, 17 bp, Artificial sequence
  Synthetic oligonucleotide
cgaagtgtcccgcgccc

SEQ ID NO: 153 - DNA, 17 bp, Artificial sequence
  Synthetic oligonucleotide
tctcgaagtgtcccgcg

SEQ ID NO: 154 - DNA, 17 bp, Artificial sequence
  Synthetic oligonucleotide
tcctctcgaagtgtccc

SEQ ID NO: 155 - DNA, 17 bp, Artificial sequence
  Synthetic oligonucleotide
gcctcctctcgaagtgt

SEQ ID NO: 156 - DNA, 17 bp, Artificial sequence
  Synthetic oligonucleotide
cccgcctcctctcgaag

SEQ ID NO: 157 - DNA, 17 bp, Artificial sequence
  Synthetic oligonucleotide
aaccccgcctcctctcg

SEQ ID NO: 158 - DNA, 17 bp, Artificial sequence
  Synthetic oligonucleotide
ccaaaccccgcctcctc

SEQ ID NO: 159 - DNA, 17 bp, Artificial sequence
  Synthetic oligonucleotide
gctccaaaccccgcctc

SEQ ID NO: 160 - DNA, 17 bp, Artificial sequence
  Synthetic oligonucleotide
ccagctccaaaccccgc

SEQ ID NO: 161 - DNA, 17 bp, Artificial sequence
  Synthetic oligonucleotide
tctccagctccaaaccc

SEQ ID NO: 162 - DNA, 17 bp, Artificial sequence
  Synthetic oligonucleotide
atctctccagctccaaa

SEQ ID NO: 163 - DNA, 17 bp, Artificial sequence
  Synthetic oligonucleotide
cacatctctccagctcc

SEQ ID NO: 164 - DNA, 17 bp, Artificial sequence
  Synthetic oligonucleotide
tgcccccacatctctcc

SEQ ID NO: 165 - DNA, 17 bp, Artificial sequence
  Synthetic oligonucleotide
cactgcccccacatctc

SEQ ID NO: 166 - DNA, 17 bp, Artificial sequence
  Synthetic oligonucleotide
atccactgcccccacat

SEQ ID NO: 167 - DNA, 17 bp, Artificial sequence
  Synthetic oligonucleotide
gtcatccactgccccca

SEQ ID NO: 168 - DNA, 17 bp, Artificial sequence
  Synthetic oligonucleotide
tatgtcatccactgccc

SEQ ID NO: 169 - DNA, 17 bp, Artificial sequence
  Synthetic oligonucleotide
aagcattatgtcatcca

SEQ ID NO: 170 - DNA, 17 bp, Artificial sequence
  Synthetic oligonucleotide
taaaagcattatgtcat

SEQ ID NO: 171 - DNA, 17 bp, Artificial sequence
  Synthetic oligonucleotide
tcctaaaagcattatgt

SEQ ID NO: 172 - DNA, 17 bp, Artificial sequence
  Synthetic oligonucleotide
ccactcccgccgaggcg

SEQ ID NO: 173 - DNA, 17 bp, Artificial sequence
  Synthetic oligonucleotide
ccgccactcccgccgag

SEQ ID NO: 174 - DNA, 17 bp, Artificial sequence
  Synthetic oligonucleotide
gccccgccactcccgcc

SEQ ID NO: 175 - DNA, 17 bp, Artificial sequence
  Synthetic oligonucleotide
cctgccccgccactccc

SEQ ID NO: 176 - DNA, 17 bp, Artificial sequence
  Synthetic oligonucleotide
gccccccccctgccccg

SEQ ID NO: 177 - DNA, 17 bp, Artificial sequence
  Synthetic oligonucleotide
tccccgccccccccctg

SEQ ID NO: 178 - DNA, 17 bp, Artificial sequence
  Synthetic oligonucleotide
cactccccgcccccccc

SEQ ID NO: 179 - DNA, 17 bp, Artificial sequence
  Synthetic oligonucleotide
gccctcactccccgccc

SEQ ID NO: 180 - DNA, 17 bp, Artificial sequence
  Synthetic oligonucleotide
cgcgccctcactccccg

SEQ ID NO: 181 - DNA, 17 bp, Artificial sequence
  Synthetic oligonucleotide
attggacgcgccctcac

SEQ ID NO: 182 - DNA, 17 bp, Artificial sequence
  Synthetic oligonucleotide
cccattggacgcgccct

SEQ ID NO: 183 - DNA, 17 bp, Artificial sequence
  Synthetic oligonucleotide
tctcccattggacgcgc

SEQ ID NO: 184 - DNA, 17 bp, Artificial sequence
  Synthetic oligonucleotide
aagaaatctcccattgg

SEQ ID NO: 185 - DNA, 17 bp, Artificial sequence
  Synthetic oligonucleotide
gaaaagaaatctcccat

SEQ ID NO: 186 - DNA, 17 bp, Artificial sequence
  Synthetic oligonucleotide
taggaaaagaaatctcc

SEQ ID NO: 187 - DNA, 17 bp, Artificial sequence
  Synthetic oligonucleotide
cactaggaaaagaaatc

SEQ ID NO: 188 - DNA, 17 bp, Artificial sequence
  Synthetic oligonucleotide
tgccactaggaaaagaa

SEQ ID NO: 189 - DNA, 17 bp, Artificial sequence
  Synthetic oligonucleotide
aagtgccactaggaaaa

SEQ ID NO: 190 - DNA, 17 bp, Artificial sequence
  Synthetic oligonucleotide
tttaagtgccactagga

SEQ ID NO: 191 - DNA, 17 bp, Artificial sequence
  Synthetic oligonucleotide
tgttttaagtgccacta

SEQ ID NO: 192 - DNA, 17 bp, Artificial sequence
  Synthetic oligonucleotide
ggctgttttaagtgcca

SEQ ID NO: 193 - DNA, 17 bp, Artificial sequence
  Synthetic oligonucleotide
tcaggctgttttaagtg

SEQ ID NO: 194 - DNA, 17 bp, Artificial sequence
  Synthetic oligonucleotide
atctcaggctgttttaa

SEQ ID NO: 195 - DNA, 17 bp, Artificial sequence
  Synthetic oligonucleotide
caaatctcaggctgttt

SEQ ID NO: 196 - DNA, 17 bp, Artificial sequence
  Synthetic oligonucleotide
cctcaaatctcaggctg

SEQ ID NO: 197 - DNA, 17 bp, Artificial sequence
  Synthetic oligonucleotide
gagcctcaaatctcagg

SEQ ID NO: 198 - DNA, 17 bp, Artificial sequence
  Synthetic oligonucleotide
gaagagcctcaaatctc

SEQ ID NO: 199 - DNA, 17 bp, Artificial sequence
  Synthetic oligonucleotide
taggaagagcctcaaat

SEQ ID NO: 200 - DNA, 17 bp, Artificial sequence
  Synthetic oligonucleotide
atgtaggaagagcctca

SEQ ID NO: 201 - DNA, 17 bp, Artificial sequence
  Synthetic oligonucleotide
acaatgtaggaagagcc

SEQ ID NO: 202 - DNA, 17 bp, Artificial sequence
  Synthetic oligonucleotide
ctgacaatgtaggaaga

SEQ ID NO: 203 - DNA, 17 bp, Artificial sequence
  Synthetic oligonucleotide
gtcctgacaatgtagga

SEQ ID NO: 204 - DNA, 17 bp, Artificial sequence
  Synthetic oligonucleotide
aatgtcctgacaatgta

SEQ ID NO: 205 - DNA, 17 bp, Artificial sequence
  Synthetic oligonucleotide
tgaaatgtcctgacaat

SEQ ID NO: 206 - DNA, 17 bp, Artificial sequence
  Synthetic oligonucleotide
aaatgaaatgtcctgac

SEQ ID NO: 207 - DNA, 17 bp, Artificial sequence
  Synthetic oligonucleotide
actaaatgaaatgtcct

SEQ ID NO: 208 - DNA, 17 bp, Artificial sequence
  Synthetic oligonucleotide
atcatgaactaaatgaa

SEQ ID NO: 209 - DNA, 17 bp, Artificial sequence
  Synthetic oligonucleotide
gtgatcatgaactaaat

SEQ ID NO: 210 - DNA, 17 bp, Artificial sequence
  Synthetic oligonucleotide
accgtgatcatgaacta

SEQ ID NO: 211 - DNA, 17 bp, Artificial sequence
  Synthetic oligonucleotide
accaccgtgatcatgaa

SEQ ID NO: 212 - DNA, 17 bp, Artificial sequence
  Synthetic oligonucleotide
actaccaccgtgatcat

SEQ ID NO: 213 - DNA, 17 bp, Artificial sequence
  Synthetic oligonucleotide
gttactaccaccgtgat

SEQ ID NO: 214 - DNA, 17 bp, Artificial sequence
  Synthetic oligonucleotide
cgtgttactaccaccgt

SEQ ID NO: 215 - DNA, 17 bp, Artificial sequence
  Synthetic oligonucleotide
ggtggtgcttaaaatcg

SEQ ID NO: 216 - DNA, 17 bp, Artificial sequence
  Synthetic oligonucleotide
ttaggtggtgcttaaaa

SEQ ID NO: 217 - DNA, 17 bp, Artificial sequence
  Synthetic oligonucleotide
ctcttaggtggtgctta

SEQ ID NO: 218 - DNA, 17 bp, Artificial sequence
  Synthetic oligonucleotide
gatctcttaggtggtgc

SEQ ID NO: 219 - DNA, 17 bp, Artificial sequence
  Synthetic oligonucleotide
gcagatctcttaggtgg

SEQ ID NO: 220 - DNA, 17 bp, Artificial sequence
  Synthetic oligonucleotide
tgagcagatctcttagg

SEQ ID NO: 221 - DNA, 17 bp, Artificial sequence
  Synthetic oligonucleotide
cttagatgagcagatct

SEQ ID NO: 222 - DNA, 17 bp, Artificial sequence
  Synthetic oligonucleotide
aggcttagatgagcaga

SEQ ID NO: 223 - DNA, 17 bp, Artificial sequence
  Synthetic oligonucleotide
caacttaggcttagatg

SEQ ID NO: 224 - DNA, 17 bp, Artificial sequence
  Synthetic oligonucleotide
gcagaccaacttaggct

SEQ ID NO: 225 - DNA, 17 bp, Artificial sequence
  Synthetic oligonucleotide
cctgcagaccaacttag

SEQ ID NO: 226 - DNA, 17 bp, Artificial sequence
  Synthetic oligonucleotide
acgcctgcagaccaact

SEQ ID NO: 227 - DNA, 17 bp, Artificial sequence
  Synthetic oligonucleotide
acaactcattcaaacgc

SEQ ID NO: 228 - DNA, 17 bp, Artificial sequence
  Synthetic oligonucleotide
accacaactcattcaaa

SEQ ID NO: 229 - DNA, 17 bp, Artificial sequence
  Synthetic oligonucleotide
gcaaccacaactcattc

SEQ ID NO: 230 - DNA, 17 bp, Artificial sequence
  Synthetic oligonucleotide
ttggcaaccacaactca

SEQ ID NO: 231 - DNA, 17 bp, Artificial sequence
  Synthetic oligonucleotide
tacttggcaaccacaac

SEQ ID NO: 232 - DNA, 17 bp, Artificial sequence
  Synthetic oligonucleotide
ctttacttggcaaccac

SEQ ID NO: 233 - DNA, 17 bp, Artificial sequence
  Synthetic oligonucleotide
tcaccactttacttggc

SEQ ID NO: 234 - DNA, 17 bp, Artificial sequence
  Synthetic oligonucleotide
agttcaccactttactt

SEQ ID NO: 235 - DNA, 17 bp, Artificial sequence
  Synthetic oligonucleotide
gtaagttcaccacttta

SEQ ID NO: 236 - DNA, 17 bp, Artificial sequence
  Synthetic oligonucleotide
tttcattaatcaccacg

SEQ ID NO: 237 - DNA, 17 bp, Artificial sequence
  Synthetic oligonucleotide
taatttcattaatcacc

SEQ ID NO: 238 - DNA, 17 bp, Artificial sequence
  Synthetic oligonucleotide
agataatttcattaatc

SEQ ID NO: 239 - DNA, 17 bp, Artificial sequence
  Synthetic oligonucleotide
ttaagataatttcatta

SEQ ID NO: 240 - DNA, 17 bp, Artificial sequence
  Synthetic oligonucleotide
cctaatatttaagataa

SEQ ID NO: 241 - DNA, 17 bp, Artificial sequence
  Synthetic oligonucleotide
cttcctaatatttaaga

SEQ ID NO: 242 - DNA, 17 bp, Artificial sequence
  Synthetic oligonucleotide
actcttcctaatattta

SEQ ID NO: 243 - DNA, 17 bp, Artificial sequence
  Synthetic oligonucleotide
tcaactcttcctaatat

SEQ ID NO: 244 - DNA, 17 bp, Artificial sequence
  Synthetic oligonucleotide
caatcaactcttcctaa

SEQ ID NO: 245 - DNA, 17 bp, Artificial sequence
  Synthetic oligonucleotide
cttcaatcaactcttcc

SEQ ID NO: 246 - DNA, 17 bp, Artificial sequence
  Synthetic oligonucleotide
aaacttcaatcaactct

SEQ ID NO: 247 - DNA, 17 bp, Artificial sequence
  Synthetic oligonucleotide
aaaaaacttcaatcaac

SEQ ID NO: 248 - DNA, 17 bp, Artificial sequence
  Synthetic oligonucleotide
ggcaaaaaacttcaatc

SEQ ID NO: 249 - DNA, 17 bp, Artificial sequence
  Synthetic oligonucleotide
ataggcaaaaaacttca

SEQ ID NO: 250 - DNA, 17 bp, Artificial sequence
  Synthetic oligonucleotide
cacataggcaaaaaact

SEQ ID NO: 251 - DNA, 17 bp, Artificial sequence
  Synthetic oligonucleotide
aacacacataggcaaaa

SEQ ID NO: 252 - DNA, 17 bp, Artificial sequence
  Synthetic oligonucleotide
cccaacacacataggca

SEQ ID NO: 253 - DNA, 17 bp, Artificial sequence
  Synthetic oligonucleotide
attcccaacacacatag

SEQ ID NO: 254 - DNA, 17 bp, Artificial sequence
  Synthetic oligonucleotide
tttattcccaacacaca

SEQ ID NO: 255 - DNA, 17 bp, Artificial sequence
  Synthetic oligonucleotide
ggttttattcccaacac

SEQ ID NO: 256 - DNA, 17 bp, Artificial sequence
  Synthetic oligonucleotide
gttggttttattcccaa

SEQ ID NO: 257 - DNA, 17 bp, Artificial sequence
  Synthetic oligonucleotide
cgtgttggttttattcc

SEQ ID NO: 258 - DNA, 17 bp, Artificial sequence
  Synthetic oligonucleotide
gtaaaagcagaacctga

SEQ ID NO: 259 - DNA, 17 bp, Artificial sequence
  Synthetic oligonucleotide
acccaagtgagggagcg

SEQ ID NO: 260 - DNA, 17 bp, Artificial sequence
  Synthetic oligonucleotide
agggaagtggcactgag

SEQ ID NO: 261 - DNA, 17 bp, Artificial sequence
  Synthetic oligonucleotide
agcattatgtcatccac

SEQ ID NO: 262 - DNA, 17 bp, Artificial sequence
  Synthetic oligonucleotide
atgaaatgtcctgacaa

SEQ ID NO: 263 - DNA, 17 bp, Artificial sequence
  Synthetic oligonucleotide
ccacaactcattcaaac

SEQ ID NO: 264 - DNA, 17 bp, Artificial sequence
  Synthetic oligonucleotide
aaaaacttcaatcaact

SEQ ID NO: 265 - DNA, 17 bp, Artificial sequence
  Synthetic oligonucleotide
caacacacataggcaaa

SEQ ID NO: 266 - DNA, 17 bp, Artificial sequence
  Synthetic oligonucleotide
agcaaacagaaaccctt

SEQ ID NO: 267 - DNA, 17 bp, Artificial sequence
  Synthetic oligonucleotide
tccaaaaagtaacaagc

SEQ ID NO: 268 - DNA, 17 bp, Artificial sequence
  Synthetic oligonucleotide
tcaaaaattctccccaa

SEQ ID NO: 269 - DNA, 17 bp, Artificial sequence
  Synthetic oligonucleotide
caccagagtacttccta

SEQ ID NO: 270 - DNA, 17 bp, Artificial sequence
  Synthetic oligonucleotide
ccagatcggaaatagaa

SEQ ID NO: 271 - DNA, 17 bp, Artificial sequence
  Synthetic oligonucleotide
gtcttaacagagatatt

SEQ ID NO: 272 - DNA, 17 bp, Artificial sequence
  Synthetic oligonucleotide
agacaaggatcataaca

SEQ ID NO: 273 - DNA, 17 bp, Artificial sequence
  Synthetic oligonucleotide
ttctaattaaactttga

SEQ ID NO: 274 - DNA, 17 bp, Artificial sequence
  Synthetic oligonucleotide
cctaaattttattccaa

SEQ ID NO: 275 - DNA, 17 bp, Artificial sequence
  Synthetic oligonucleotide
ccaaatatccaaaaagt

SEQ ID NO: 276 - DNA, 17 bp, Artificial sequence
  Synthetic oligonucleotide
ctacagtaaatttctgg

SEQ ID NO: 277 - DNA, 17 bp, Artificial sequence
  Synthetic oligonucleotide
tcctagaaaagcactac

SEQ ID NO: 278 - DNA, 17 bp, Artificial sequence
  Synthetic oligonucleotide
gtttacacaagatacat

SEQ ID NO: 279 - DNA, 17 bp, Artificial sequence
  Synthetic oligonucleotide
tatttttagaatgatca

SEQ ID NO: 280 - DNA, 17 bp, Artificial sequence
  Synthetic oligonucleotide
tgtcaaatcagcataag

SEQ ID NO: 281 - DNA, 17 bp, Artificial sequence
  Synthetic oligonucleotide
acccatattttgaagat

SEQ ID NO: 282 - DNA, 17 bp, Artificial sequence
  Synthetic oligonucleotide
acaaaatctatctcctt

SEQ ID NO: 283 - DNA, 17 bp, Artificial sequence
  Synthetic oligonucleotide
aatcatatattacctta

SEQ ID NO: 284 - DNA, 17 bp, Artificial sequence
  Synthetic oligonucleotide
gtcaatgtattacttat

SEQ ID NO: 285 - DNA, 17 bp, Artificial sequence
  Synthetic oligonucleotide
gtggaaggaagatattt

SEQ ID NO: 286 - DNA, 17 bp, Artificial sequence
  Synthetic oligonucleotide
ttatatctggcaggata

SEQ ID NO: 287 - DNA, 17 bp, Artificial sequence
  Synthetic oligonucleotide
ttaaatctatcttacaa

SEQ ID NO: 288 - DNA, 17 bp, Artificial sequence
  Synthetic oligonucleotide
tgacaatgtgagactac

SEQ ID NO: 289 - DNA, 17 bp, Artificial sequence
  Synthetic oligonucleotide
ataaataaacctaatgc

SEQ ID NO: 290 - DNA, 17 bp, Artificial sequence
  Synthetic oligonucleotide
aattagtgaatacctcc

SEQ ID NO: 291 - DNA, 17 bp, Artificial sequence
  Synthetic oligonucleotide
caaaatccaaactttgt

SEQ ID NO: 292 - DNA, 17 bp, Artificial sequence
  Synthetic oligonucleotide
acagaacagatactttc

SEQ ID NO: 293 - DNA, 17 bp, Artificial sequence
  Synthetic oligonucleotide
tcataaactgaggccca

SEQ ID NO: 294 - DNA, 17 bp, Artificial sequence
  Synthetic oligonucleotide
ctaattactgtgaggac

SEQ ID NO: 295 - DNA, 17 bp, Artificial sequence
  Synthetic oligonucleotide
taagaaactgccagaag

SEQ ID NO: 296 - DNA, 17 bp, Artificial sequence
  Synthetic oligonucleotide
agtcagggaaacaccag

SEQ ID NO: 297 - DNA, 17 bp, Artificial sequence
  Synthetic oligonucleotide
gtacatgtttagtaaat

SEQ ID NO: 298 - DNA, 17 bp, Artificial sequence
  Synthetic oligonucleotide
atgaaagcttcacgagg

SEQ ID NO: 299 - DNA, 17 bp, Artificial sequence
  Synthetic oligonucleotide
caacacttagtgctaca

SEQ ID NO: 300 - DNA, 17 bp, Artificial sequence
  Synthetic oligonucleotide
ttaaaatatcaacactg

SEQ ID NO: 301 - DNA, 17 bp, Artificial sequence
  Synthetic oligonucleotide
tacgatagtgatactgc

SEQ ID NO: 302 - DNA, 17 bp, Artificial sequence
  Synthetic oligonucleotide
ccttacactagactctt

SEQ ID NO: 303 - DNA, 17 bp, Artificial sequence
  Synthetic oligonucleotide
ctgaaacaggaagattt

SEQ ID NO: 304 - DNA, 17 bp, Artificial sequence
  Synthetic oligonucleotide
tacaaatgtccccctca

SEQ ID NO: 305 - DNA, 17 bp, Artificial sequence
  Synthetic oligonucleotide
gccaatatctttattcc

SEQ ID NO: 306 - DNA, 17 bp, Artificial sequence
  Synthetic oligonucleotide
taagattgaaattcaga

SEQ ID NO: 307 - DNA, 17 bp, Artificial sequence
  Synthetic oligonucleotide
tcaaaatccagtcagtc

SEQ ID NO: 308 - DNA, 17 bp, Artificial sequence
  Synthetic oligonucleotide
tgctaaattgttatact

SEQ ID NO: 309 - DNA, 17 bp, Artificial sequence
  Synthetic oligonucleotide
agctattgcagcaggat

SEQ ID NO: 310 - DNA, 17 bp, Artificial sequence
  Synthetic oligonucleotide
tataagaaagagcctgg

SEQ ID NO: 311 - DNA, 17 bp, Artificial sequence
  Synthetic oligonucleotide
gaacaagggtttgcaag

SEQ ID NO: 312 - DNA, 17 bp, Artificial sequence
  Synthetic oligonucleotide
gacaatccaaaggaagg

SEQ ID NO: 313 - DNA, 17 bp, Artificial sequence
  Synthetic oligonucleotide
gatcagacttaaatgta

SEQ ID NO: 314 - DNA, 17 bp, Artificial sequence
  Synthetic oligonucleotide
actaagataattccatg

SEQ ID NO: 315 - DNA, 17 bp, Artificial sequence
  Synthetic oligonucleotide
aattaaggacgattaat

SEQ ID NO: 316 - DNA, 17 bp, Artificial sequence
  Synthetic oligonucleotide
aatttatacaattaagg

SEQ ID NO: 317 - DNA, 17 bp, Artificial sequence
  Synthetic oligonucleotide
tggcacaggatcgacat

SEQ ID NO: 318 - DNA, 17 bp, Artificial sequence
  Synthetic oligonucleotide
cggaaatgcaagggacc

SEQ ID NO: 319 - DNA, 17 bp, Artificial sequence
  Synthetic oligonucleotide
ttacacaaagtttgccc

SEQ ID NO: 320 - DNA, 17 bp, Artificial sequence
  Synthetic oligonucleotide
tacaatggcagagccgc

SEQ ID NO: 321 - DNA, 17 bp, Artificial sequence
  Synthetic oligonucleotide
tcaaatactatctcatg

SEQ ID NO: 322 - DNA, 17 bp, Artificial sequence
  Synthetic oligonucleotide
aaaactataacctgcat

SEQ ID NO: 323 - DNA, 17 bp, Artificial sequence
  Synthetic oligonucleotide
aaagaaatgctttccag

SEQ ID NO: 324 - DNA, 17 bp, Artificial sequence
  Synthetic oligonucleotide
agacaaagatgacagac

SEQ ID NO: 325 - DNA, 17 bp, Artificial sequence
  Synthetic oligonucleotide
gggaagaagacacaaga

SEQ ID NO: 326 - DNA, 17 bp, Artificial sequence
  Synthetic oligonucleotide
catttaaatgcttgtat

SEQ ID NO: 327 - DNA, 17 bp, Artificial sequence
  Synthetic oligonucleotide
aacaatatctatgacac

SEQ ID NO: 328 - DNA, 17 bp, Artificial sequence
  Synthetic oligonucleotide
ataagaattacaggtac

SEQ ID NO: 329 - DNA, 17 bp, Artificial sequence
  Synthetic oligonucleotide
tctaaaatattacatag

SEQ ID NO: 330 - DNA, 17 bp, Artificial sequence
  Synthetic oligonucleotide
agccacaaaaatgtgag

SEQ ID NO: 331 - DNA, 17 bp, Artificial sequence
  Synthetic oligonucleotide
atttacaggaaatggag

SEQ ID NO: 332 - DNA, 17 bp, Artificial sequence
  Synthetic oligonucleotide
actaaatgttttgagtg

SEQ ID NO: 333 - DNA, 17 bp, Artificial sequence
  Synthetic oligonucleotide
ggtaaaagcagaacctg

SEQ ID NO: 334 - DNA, 17 bp, Artificial sequence
  Synthetic oligonucleotide
gacaagggaagacccaa

SEQ ID NO: 335 - DNA, 17 bp, Artificial sequence
  Synthetic oligonucleotide
aaagaaacaagttctcg

SEQ ID NO: 336 - DNA, 17 bp, Artificial sequence
  Synthetic oligonucleotide
ctaaaagcattatgtca

SEQ ID NO: 337 - DNA, 17 bp, Artificial sequence
  Synthetic oligonucleotide
ggaaaagaaatctccca

SEQ ID NO: 338 - DNA, 17 bp, Artificial sequence
  Synthetic oligonucleotide
aatgaaatgtcctgaca

SEQ ID NO: 339 - DNA, 17 bp, Artificial sequence
  Synthetic oligonucleotide
ccactttacttggcaac

SEQ ID NO: 340 - DNA, 17 bp, Artificial sequence
  Synthetic oligonucleotide
cggcaattaacctcccc

SEQ ID NO: 341 - DNA, 17 bp, Artificial sequence
  Synthetic oligonucleotide
aagcaaacagaaaccct

SEQ ID NO: 342 - DNA, 17 bp, Artificial sequence
  Synthetic oligonucleotide
ttccaaaaagtaacaag

SEQ ID NO: 343 - DNA, 17 bp, Artificial sequence
  Synthetic oligonucleotide
ttcaaaaattctcccca

SEQ ID NO: 344 - DNA, 17 bp, Artificial sequence
  Synthetic oligonucleotide
taagagaaaggcctgaa

SEQ ID NO: 345 - DNA, 17 bp, Artificial sequence
  Synthetic oligonucleotide
atccagatcggaaatag

SEQ ID NO: 346 - DNA, 17 bp, Artificial sequence
  Synthetic oligonucleotide
aattaatcagtcttaac

SEQ ID NO: 347 - DNA, 17 bp, Artificial sequence
  Synthetic oligonucleotide
gacgagacaaggatcat

SEQ ID NO: 348 - DNA, 17 bp, Artificial sequence
  Synthetic oligonucleotide
tccgaatcattttctaa

SEQ ID NO: 349 - DNA, 17 bp, Artificial sequence
  Synthetic oligonucleotide
tcctaaattttattcca

SEQ ID NO: 350 - DNA, 17 bp, Artificial sequence
  Synthetic oligonucleotide
tccaaatatccaaaaag

SEQ ID NO: 351 - DNA, 17 bp, Artificial sequence
  Synthetic oligonucleotide
cactacagtaaatttct

SEQ ID NO: 352 - DNA, 17 bp, Artificial sequence
  Synthetic oligonucleotide
tgcaatgtgtgaacttt

SEQ ID NO: 353 - DNA, 17 bp, Artificial sequence
  Synthetic oligonucleotide
gtttagtgtttacacaa

SEQ ID NO: 354 - DNA, 17 bp, Artificial sequence
  Synthetic oligonucleotide
gcatatttttagaatga

SEQ ID NO: 355 - DNA, 17 bp, Artificial sequence
  Synthetic oligonucleotide
gcaaatgcaggttctgt

SEQ ID NO: 356 - DNA, 17 bp, Artificial sequence
  Synthetic oligonucleotide
aggaaatttcttgatac

SEQ ID NO: 357 - DNA, 17 bp, Artificial sequence
  Synthetic oligonucleotide
tgaaacaaaatctatct

SEQ ID NO: 358 - DNA, 17 bp, Artificial sequence
  Synthetic oligonucleotide
aataaggtaatcatata

SEQ ID NO: 359 - DNA, 17 bp, Artificial sequence
  Synthetic oligonucleotide
tgtcaatgtattactta

SEQ ID NO: 360 - DNA, 17 bp, Artificial sequence
  Synthetic oligonucleotide
acaaagttaggtactca

SEQ ID NO: 361 - DNA, 17 bp, Artificial sequence
  Synthetic oligonucleotide
gaacaggttatatctgg

SEQ ID NO: 362 - DNA, 17 bp, Artificial sequence
  Synthetic oligonucleotide
tttaaatctatcttaca

SEQ ID NO: 363 - DNA, 17 bp, Artificial sequence
  Synthetic oligonucleotide
agttattattctagcca

SEQ ID NO: 364 - DNA, 17 bp, Artificial sequence
  Synthetic oligonucleotide
tataaataaacctaatg

SEQ ID NO: 365 - DNA, 17 bp, Artificial sequence
  Synthetic oligonucleotide
aaattagtgaatacctc

SEQ ID NO: 366 - DNA, 17 bp, Artificial sequence
  Synthetic oligonucleotide
ccaaaatccaaactttg

SEQ ID NO: 367 - DNA, 17 bp, Artificial sequence
  Synthetic oligonucleotide
aaacagaacagatactt

SEQ ID NO: 368 - DNA, 17 bp, Artificial sequence
  Synthetic oligonucleotide
aaacactcataaactga

SEQ ID NO: 369 - DNA, 17 bp, Artificial sequence
  Synthetic oligonucleotide
tcctaattactgtgagg

SEQ ID NO: 370 - DNA, 17 bp, Artificial sequence
  Synthetic oligonucleotide
gaataagaaactgccag

SEQ ID NO: 371 - DNA, 17 bp, Artificial sequence
  Synthetic oligonucleotide
aataaagtcagggaaac

SEQ ID NO: 372 - DNA, 17 bp, Artificial sequence
  Synthetic oligonucleotide
acatagtacatgtttag

SEQ ID NO: 373 - DNA, 17 bp, Artificial sequence
  Synthetic oligonucleotide
aatgaaagcttcacgag

SEQ ID NO: 374 - DNA, 17 bp, Artificial sequence
  Synthetic oligonucleotide
tgatagagcaagaactg

SEQ ID NO: 375 - DNA, 17 bp, Artificial sequence
  Synthetic oligonucleotide
gtatttaaaatatcaac

SEQ ID NO: 376 - DNA, 17 bp, Artificial sequence
  Synthetic oligonucleotide
ctacgatagtgatactg

SEQ ID NO: 377 - DNA, 17 bp, Artificial sequence
  Synthetic oligonucleotide
taccactacttcataca

SEQ ID NO: 378 - DNA, 17 bp, Artificial sequence
  Synthetic oligonucleotide
cctgaaacaggaagatt

SEQ ID NO: 379 - DNA, 17 bp, Artificial sequence
  Synthetic oligonucleotide
ctacaaatgtccccctc

SEQ ID NO: 380 - DNA, 17 bp, Artificial sequence
  Synthetic oligonucleotide
ataaatgccaatatctt

SEQ ID NO: 381 - DNA, 17 bp, Artificial sequence
  Synthetic oligonucleotide
cttaagattgaaattca

SEQ ID NO: 382 - DNA, 17 bp, Artificial sequence
  Synthetic oligonucleotide
ccgcattcaaaatccag

SEQ ID NO: 383 - DNA, 17 bp, Artificial sequence
  Synthetic oligonucleotide
agctactgctaaattgt

SEQ ID NO: 384 - DNA, 17 bp, Artificial sequence
  Synthetic oligonucleotide
gtttaagctattgcagc

SEQ ID NO: 385 - DNA, 17 bp, Artificial sequence
  Synthetic oligonucleotide
gtataagaaagagcctg

SEQ ID NO: 386 - DNA, 17 bp, Artificial sequence
  Synthetic oligonucleotide
aatgagaacaagggttt

SEQ ID NO: 387 - DNA, 17 bp, Artificial sequence
  Synthetic oligonucleotide
agacaatccaaaggaag

SEQ ID NO: 388 - DNA, 17 bp, Artificial sequence
  Synthetic oligonucleotide
caaaatggatcagactt

SEQ ID NO: 389 - DNA, 17 bp, Artificial sequence
  Synthetic oligonucleotide
tactaagataattccat

SEQ ID NO: 390 - DNA, 17 bp, Artificial sequence
  Synthetic oligonucleotide
caattaaggacgattaa

SEQ ID NO: 391 - DNA, 17 bp, Artificial sequence
  Synthetic oligonucleotide
caacaggtagaactgac

SEQ ID NO: 392 - DNA, 17 bp, Artificial sequence
  Synthetic oligonucleotide
cacaaacttcagtaatc

SEQ ID NO: 393 - DNA, 17 bp, Artificial sequence
  Synthetic oligonucleotide
acggaaatgcaagggac

SEQ ID NO: 394 - DNA, 17 bp, Artificial sequence
  Synthetic oligonucleotide
atttacacaaagtttgc

SEQ ID NO: 395 - DNA, 17 bp, Artificial sequence
  Synthetic oligonucleotide
ctacaatggcagagccg

SEQ ID NO: 396 - DNA, 17 bp, Artificial sequence
  Synthetic oligonucleotide
gaccaaaataatcaaat

SEQ ID NO: 397 - DNA, 17 bp, Artificial sequence
  Synthetic oligonucleotide
gaaaactataacctgca

SEQ ID NO: 398 - DNA, 17 bp, Artificial sequence
  Synthetic oligonucleotide
gccaaaaaagaaatgct

SEQ ID NO: 399 - DNA, 17 bp, Artificial sequence
  Synthetic oligonucleotide
agttagacaaagatgac

SEQ ID NO: 400 - DNA, 17 bp, Artificial sequence
  Synthetic oligonucleotide
taaaatctgggaagaag

SEQ ID NO: 401 - DNA, 17 bp, Artificial sequence
  Synthetic oligonucleotide
acacatttaaatgcttg

SEQ ID NO: 402 - DNA, 17 bp, Artificial sequence
  Synthetic oligonucleotide
gaacaatatctatgaca

SEQ ID NO: 403 - DNA, 17 bp, Artificial sequence
  Synthetic oligonucleotide
taataagaattacaggt

SEQ ID NO: 404 - DNA, 17 bp, Artificial sequence
  Synthetic oligonucleotide
ccaaaagtcctctttta

SEQ ID NO: 405 - DNA, 17 bp, Artificial sequence
  Synthetic oligonucleotide
gagaatatgtcaccagc

SEQ ID NO: 406 - DNA, 17 bp, Artificial sequence
  Synthetic oligonucleotide
ttatttacaggaaatgg

SEQ ID NO: 407 - DNA, 17 bp, Artificial sequence
  Synthetic oligonucleotide
gactaaatgttttgagt

SEQ ID NO: 408 - DNA, 17 bp, Artificial sequence
  Synthetic oligonucleotide
ccgcaggtaaaagcaga

SEQ ID NO: 409 - DNA, 17 bp, Artificial sequence
  Synthetic oligonucleotide
ggacaagggaagaccca

SEQ ID NO: 410 - DNA, 17 bp, Artificial sequence
  Synthetic oligonucleotide
cctaaaagcattatgtc

SEQ ID NO: 411 - DNA, 17 bp, Artificial sequence
  Synthetic oligonucleotide
aggaaaagaaatctccc

SEQ ID NO: 412 - DNA, 17 bp, Artificial sequence
  Synthetic oligonucleotide
aactaaatgaaatgtcc

SEQ ID NO: 413 - DNA, 17 bp, Artificial sequence
  Synthetic oligonucleotide
caccactttacttggca

SEQ ID NO: 414 - DNA, 17 bp, Artificial sequence
  Synthetic oligonucleotide
caaaaaacttcaatcaa

SEQ ID NO: 415 - DNA, 17 bp, Artificial sequence
  Synthetic oligonucleotide
gtaaaatgtacacctca

SEQ ID NO: 416 - DNA, 17 bp, Artificial sequence
  Synthetic oligonucleotide
caatgaagcaaacagaa

SEQ ID NO: 417 - DNA, 17 bp, Artificial sequence
  Synthetic oligonucleotide
agcaacagaaaccccta

SEQ ID NO: 418 - DNA, 17 bp, Artificial sequence
  Synthetic oligonucleotide
tttcaaaaattctcccc

SEQ ID NO: 419 - DNA, 17 bp, Artificial sequence
  Synthetic oligonucleotide
ggtaagagaaaggcctg

SEQ ID NO: 420 - DNA, 17 bp, Artificial sequence
  Synthetic oligonucleotide
acacatccagatcggaa

SEQ ID NO: 421 - DNA, 17 bp, Artificial sequence
  Synthetic oligonucleotide
aaattaatcagtcttaa

SEQ ID NO: 422 - DNA, 17 bp, Artificial sequence
  Synthetic oligonucleotide
ttgaagacgagacaagg

SEQ ID NO: 423 - DNA, 17 bp, Artificial sequence
  Synthetic oligonucleotide
aaataagctaacactgc

SEQ ID NO: 424 - DNA, 17 bp, Artificial sequence
  Synthetic oligonucleotide
agaataatttattccta

SEQ ID NO: 425 - DNA, 17 bp, Artificial sequence
  Synthetic oligonucleotide
agataagccaaattgtt

SEQ ID NO: 426 - DNA, 17 bp, Artificial sequence
  Synthetic oligonucleotide
agcactacagtaaattt

SEQ ID NO: 427 - DNA, 17 bp, Artificial sequence
  Synthetic oligonucleotide
atacatgcaatgtgtga

SEQ ID NO: 428 - DNA, 17 bp, Artificial sequence
  Synthetic oligonucleotide
cagaaaggtcttccttc

SEQ ID NO: 429 - DNA, 17 bp, Artificial sequence
  Synthetic oligonucleotide
aggcatatttttagaat

SEQ ID NO: 430 - DNA, 17 bp, Artificial sequence
  Synthetic oligonucleotide
agcaaatgcaggttctg

SEQ ID NO: 431 - DNA, 17 bp, Artificial sequence
  Synthetic oligonucleotide
aaggaaatttcttgata

SEQ ID NO: 432 - DNA, 17 bp, Artificial sequence
  Synthetic oligonucleotide
atgaaacaaaatctatc

SEQ ID NO: 433 - DNA, 17 bp, Artificial sequence
  Synthetic oligonucleotide
aaataaggtaatcatat

SEQ ID NO: 434 - DNA, 17 bp, Artificial sequence
  Synthetic oligonucleotide
acagaatttgtatcatg

SEQ ID NO: 435 - DNA, 17 bp, Artificial sequence
  Synthetic oligonucleotide
gacaaagttaggtactc

SEQ ID NO: 436 - DNA, 17 bp, Artificial sequence
  Synthetic oligonucleotide
atgaacaggttatatct

SEQ ID NO: 437 - DNA, 17 bp, Artificial sequence
  Synthetic oligonucleotide
gcattttaaatctatct

SEQ ID NO: 438 - DNA, 17 bp, Artificial sequence
  Synthetic oligonucleotide
taagaacctttaaaagt

SEQ ID NO: 439 - DNA, 17 bp, Artificial sequence
  Synthetic oligonucleotide
ctataaataaacctaat

SEQ ID NO: 440 - DNA, 17 bp, Artificial sequence
  Synthetic oligonucleotide
aaaattagtgaatacct

SEQ ID NO: 441 - DNA, 17 bp, Artificial sequence
  Synthetic oligonucleotide
gccaaaatccaaacttt

SEQ ID NO: 442 - DNA, 17 bp, Artificial sequence
  Synthetic oligonucleotide
ccataaaaacagaacag

SEQ ID NO: 443 - DNA, 17 bp, Artificial sequence
  Synthetic oligonucleotide
gcacaaacactcataaa

SEQ ID NO: 444 - DNA, 17 bp, Artificial sequence
  Synthetic oligonucleotide
tattaattgcctcctaa

SEQ ID NO: 445 - DNA, 17 bp, Artificial sequence
  Synthetic oligonucleotide
agaataagaaactgcca

SEQ ID NO: 446 - DNA, 17 bp, Artificial sequence
  Synthetic oligonucleotide
gaataaagtcagggaaa

SEQ ID NO: 447 - DNA, 17 bp, Artificial sequence
  Synthetic oligonucleotide
gcacatagtacatgttt

SEQ ID NO: 448 - DNA, 17 bp, Artificial sequence
  Synthetic oligonucleotide
cattagaatgaaagctt

SEQ ID NO: 449 - DNA, 17 bp, Artificial sequence
  Synthetic oligonucleotide
gctgatagagcaagaac

SEQ ID NO: 450 - DNA, 17 bp, Artificial sequence
  Synthetic oligonucleotide
cgtatttaaaatatcaa

SEQ ID NO: 451 - DNA, 17 bp, Artificial sequence
  Synthetic oligonucleotide
agctacgatagtgatac

SEQ ID NO: 452 - DNA, 17 bp, Artificial sequence
  Synthetic oligonucleotide
tggaataccactacttc

SEQ ID NO: 453 - DNA, 17 bp, Artificial sequence
  Synthetic oligonucleotide
taaaatgacatccttgc

SEQ ID NO: 454 - DNA, 17 bp, Artificial sequence
  Synthetic oligonucleotide
tcttactacaaatgtcc

SEQ ID NO: 455 - DNA, 17 bp, Artificial sequence
  Synthetic oligonucleotide
cataaatgccaatatct

SEQ ID NO: 456 - DNA, 17 bp, Artificial sequence
  Synthetic oligonucleotide
cacttaagattgaaatt

SEQ ID NO: 457 - DNA, 17 bp, Artificial sequence
  Synthetic oligonucleotide
caacaagtgcagttggt

SEQ ID NO: 458 - DNA, 17 bp, Artificial sequence
  Synthetic oligonucleotide
acgcaagctactgctaa

SEQ ID NO: 459 - DNA, 17 bp, Artificial sequence
  Synthetic oligonucleotide
tgataagctcttgcttg

SEQ ID NO: 460 - DNA, 17 bp, Artificial sequence
  Synthetic oligonucleotide
agtataagaaagagcct

SEQ ID NO: 461 - DNA, 17 bp, Artificial sequence
  Synthetic oligonucleotide
tgataagaatccagtat

SEQ ID NO: 462 - DNA, 17 bp, Artificial sequence
  Synthetic oligonucleotide
atagataaactcgactt

SEQ ID NO: 463 - DNA, 17 bp, Artificial sequence
  Synthetic oligonucleotide
tcaaaatggatcagact

SEQ ID NO: 464 - DNA, 17 bp, Artificial sequence
  Synthetic oligonucleotide
gggtactaagataattc

SEQ ID NO: 465 - DNA, 17 bp, Artificial sequence
  Synthetic oligonucleotide
acaattaaggacgatta

SEQ ID NO: 466 - DNA, 17 bp, Artificial sequence
  Synthetic oligonucleotide
gaccaacaggtagaact

SEQ ID NO: 467 - DNA, 17 bp, Artificial sequence
  Synthetic oligonucleotide
acacaaacttcagtaat

SEQ ID NO: 468 - DNA, 17 bp, Artificial sequence
  Synthetic oligonucleotide
tcctacttggcttcttt

SEQ ID NO: 469 - DNA, 17 bp, Artificial sequence
  Synthetic oligonucleotide
accatttacacaaagtt

SEQ ID NO: 470 - DNA, 17 bp, Artificial sequence
  Synthetic oligonucleotide
tgcttatggctactttc

SEQ ID NO: 471 - DNA, 17 bp, Artificial sequence
  Synthetic oligonucleotide
ttaaatggttgaccaaa

SEQ ID NO: 472 - DNA, 17 bp, Artificial sequence
  Synthetic oligonucleotide
ggaaaactataacctgc

SEQ ID NO: 473 - DNA, 17 bp, Artificial sequence
  Synthetic oligonucleotide
gtatatgtgtaactttt

SEQ ID NO: 474 - DNA, 17 bp, Artificial sequence
  Synthetic oligonucleotide
taggaagttagacaaag

SEQ ID NO: 475 - DNA, 17 bp, Artificial sequence
  Synthetic oligonucleotide
tattaaaatctgggaag

SEQ ID NO: 476 - DNA, 17 bp, Artificial sequence
  Synthetic oligonucleotide
tgacacatttaaatgct

SEQ ID NO: 477 - DNA, 17 bp, Artificial sequence
  Synthetic oligonucleotide
tggaacaatatctatga

SEQ ID NO: 478 - DNA, 17 bp, Artificial sequence
  Synthetic oligonucleotide
ttaataagaattacagg

SEQ ID NO: 479 - DNA, 17 bp, Artificial sequence
  Synthetic oligonucleotide
tccaaaagtcctctttt

SEQ ID NO: 480 - DNA, 17 bp, Artificial sequence
  Synthetic oligonucleotide
agagaatatgtcaccag

SEQ ID NO: 481 - DNA, 17 bp, Artificial sequence
  Synthetic oligonucleotide
gacttatttacaggaaa

SEQ ID NO: 482 - DNA, 17 bp, Artificial sequence
  Synthetic oligonucleotide
taagactaaatgttttg

SEQ ID NO: 483 - DNA, 17 bp, Artificial sequence
  Synthetic oligonucleotide
agctgaggaggcggcgg

SEQ ID NO: 484 - DNA, 17 bp, Artificial sequence
  Synthetic oligonucleotide
cgcgagaggacaaggga

SEQ ID NO: 485 - DNA, 17 bp, Artificial sequence
  Synthetic oligonucleotide
agttaaaagaacccccg

SEQ ID NO: 486 - DNA, 17 bp, Artificial sequence
  Synthetic oligonucleotide
gactagaagagggaagt

SEQ ID NO: 487 - DNA, 17 bp, Artificial sequence
  Synthetic oligonucleotide
ggtaaaatgtacacctc

SEQ ID NO: 488 - DNA, 17 bp, Artificial sequence
  Synthetic oligonucleotide
agcaatgaagcaaacag

SEQ ID NO: 489 - DNA, 17 bp, Artificial sequence
  Synthetic oligonucleotide
aagcaacagaaacccct

SEQ ID NO: 490 - DNA, 17 bp, Artificial sequence
  Synthetic oligonucleotide
gttttaatggtctctct

SEQ ID NO: 491 - DNA, 17 bp, Artificial sequence
  Synthetic oligonucleotide
gaatactgagaggtaag

SEQ ID NO: 492 - DNA, 17 bp, Artificial sequence
  Synthetic oligonucleotide
tgccatctgggacacat

SEQ ID NO: 493 - DNA, 17 bp, Artificial sequence
  Synthetic oligonucleotide
aaaattaatcagtctta

SEQ ID NO: 494 - DNA, 17 bp, Artificial sequence
  Synthetic oligonucleotide
ttaaactttgaagacga

SEQ ID NO: 495 - DNA, 17 bp, Artificial sequence
  Synthetic oligonucleotide
caaataagctaacactg

SEQ ID NO: 496 - DNA, 17 bp, Artificial sequence
  Synthetic oligonucleotide
tcctttagaataattta

SEQ ID NO: 497 - DNA, 17 bp, Artificial sequence
  Synthetic oligonucleotide
gaagagataagccaaat

SEQ ID NO: 498 - DNA, 17 bp, Artificial sequence
  Synthetic oligonucleotide
aagcactacagtaaatt

SEQ ID NO: 499 - DNA, 17 bp, Artificial sequence
  Synthetic oligonucleotide
caagatacatgcaatgt

SEQ ID NO: 500 - DNA, 17 bp, Artificial sequence
  Synthetic oligonucleotide
gcagaaaggtcttcctt

SEQ ID NO: 501 - DNA, 17 bp, Artificial sequence
  Synthetic oligonucleotide
gagaaggcatattttta

SEQ ID NO: 502 - DNA, 17 bp, Artificial sequence
  Synthetic oligonucleotide
agataagcaaatgcagg

SEQ ID NO: 503 - DNA, 17 bp, Artificial sequence
  Synthetic oligonucleotide
agcaaaggaaatttctt

SEQ ID NO: 504 - DNA, 17 bp, Artificial sequence
  Synthetic oligonucleotide
cttaaagtaatgaaaca

SEQ ID NO: 505 - DNA, 17 bp, Artificial sequence
  Synthetic oligonucleotide
taaataaggtaatcata

SEQ ID NO: 506 - DNA, 17 bp, Artificial sequence
  Synthetic oligonucleotide
ttacagaatttgtatca

SEQ ID NO: 507 - DNA, 17 bp, Artificial sequence
  Synthetic oligonucleotide
tgaaatagtgcttgttc

SEQ ID NO: 508 - DNA, 17 bp, Artificial sequence
  Synthetic oligonucleotide
tatgaacaggttatatc

SEQ ID NO: 509 - DNA, 17 bp, Artificial sequence
  Synthetic oligonucleotide
ctaaactacttttgttt

SEQ ID NO: 510 - DNA, 17 bp, Artificial sequence
  Synthetic oligonucleotide
ctaagaacctttaaaag

SEQ ID NO: 511 - DNA, 17 bp, Artificial sequence
  Synthetic oligonucleotide
actataaataaacctaa

SEQ ID NO: 512 - DNA, 17 bp, Artificial sequence
  Synthetic oligonucleotide
caaaattagtgaatacc

SEQ ID NO: 513 - DNA, 17 bp, Artificial sequence
  Synthetic oligonucleotide
aacagaactgccaaaat

SEQ ID NO: 514 - DNA, 17 bp, Artificial sequence
  Synthetic oligonucleotide
agcaagagccataaaaa

SEQ ID NO: 515 - DNA, 17 bp, Artificial sequence
  Synthetic oligonucleotide
gagcagagcacaaacac

SEQ ID NO: 516 - DNA, 17 bp, Artificial sequence
  Synthetic oligonucleotide
gtattaattgcctccta

SEQ ID NO: 517 - DNA, 17 bp, Artificial sequence
  Synthetic oligonucleotide
gagaataagaaactgcc

SEQ ID NO: 518 - DNA, 17 bp, Artificial sequence
  Synthetic oligonucleotide
atgaataaagtcaggga

SEQ ID NO: 519 - DNA, 17 bp, Artificial sequence
  Synthetic oligonucleotide
aggcacatagtacatgt

SEQ ID NO: 520 - DNA, 17 bp, Artificial sequence
  Synthetic oligonucleotide
cttcattagaatgaaag

SEQ ID NO: 521 - DNA, 17 bp, Artificial sequence
  Synthetic oligonucleotide
ggctgatagagcaagaa

SEQ ID NO: 522 - DNA, 17 bp, Artificial sequence
  Synthetic oligonucleotide
ccgtatttaaaatatca

SEQ ID NO: 523 - DNA, 17 bp, Artificial sequence
  Synthetic oligonucleotide
caacacattgtgaggtt

SEQ ID NO: 524 - DNA, 17 bp, Artificial sequence
  Synthetic oligonucleotide
aggaagattttggacct

SEQ ID NO: 525 - DNA, 17 bp, Artificial sequence
  Synthetic oligonucleotide
ctaaaatgacatccttg

SEQ ID NO: 526 - DNA, 17 bp, Artificial sequence
  Synthetic oligonucleotide
ggcaagtagtattggtc

SEQ ID NO: 527 - DNA, 17 bp, Artificial sequence
  Synthetic oligonucleotide
acataaatgccaatatc

SEQ ID NO: 528 - DNA, 17 bp, Artificial sequence
  Synthetic oligonucleotide
agccagagttcacttaa

SEQ ID NO: 529 - DNA, 17 bp, Artificial sequence
  Synthetic oligonucleotide
tagcagagttcaacaag

SEQ ID NO: 530 - DNA, 17 bp, Artificial sequence
  Synthetic oligonucleotide
gataacgcaagctactg

SEQ ID NO: 531 - DNA, 17 bp, Artificial sequence
  Synthetic oligonucleotide
gacttatttttgtcttc

SEQ ID NO: 532 - DNA, 17 bp, Artificial sequence
  Synthetic oligonucleotide
taagtataagaaagagc

SEQ ID NO: 533 - DNA, 17 bp, Artificial sequence
  Synthetic oligonucleotide
agtttttacaaatcatc

SEQ ID NO: 534 - DNA, 17 bp, Artificial sequence
  Synthetic oligonucleotide
aatagataaactcgact

SEQ ID NO: 535 - DNA, 17 bp, Artificial sequence
  Synthetic oligonucleotide
aataaagttggacttct

SEQ ID NO: 536 - DNA, 17 bp, Artificial sequence
  Synthetic oligonucleotide
aacaagggtactaagat

SEQ ID NO: 537 - DNA, 17 bp, Artificial sequence
  Synthetic oligonucleotide
tacaattaaggacgatt

SEQ ID NO: 538 - DNA, 17 bp, Artificial sequence
  Synthetic oligonucleotide
ataaagaccaacaggta

SEQ ID NO: 539 - DNA, 17 bp, Artificial sequence
  Synthetic oligonucleotide
ttaaactgtgacacaaa

SEQ ID NO: 540 - DNA, 17 bp, Artificial sequence
  Synthetic oligonucleotide
acacaatccctctcaga

SEQ ID NO: 541 - DNA, 17 bp, Artificial sequence
  Synthetic oligonucleotide
aatacttacaatctgac

SEQ ID NO: 542 - DNA, 17 bp, Artificial sequence
  Synthetic oligonucleotide
atacatattgcttatgg

SEQ ID NO: 543 - DNA, 17 bp, Artificial sequence
  Synthetic oligonucleotide
tttaaatggttgaccaa

SEQ ID NO: 544 - DNA, 17 bp, Artificial sequence
  Synthetic oligonucleotide
gggaaaactataacctg

SEQ ID NO: 545 - DNA, 17 bp, Artificial sequence
  Synthetic oligonucleotide
caagaagggctttgttt

SEQ ID NO: 546 - DNA, 17 bp, Artificial sequence
  Synthetic oligonucleotide
ttcttaggaagttagac

SEQ ID NO: 547 - DNA, 17 bp, Artificial sequence
  Synthetic oligonucleotide
atattaaaatctgggaa

SEQ ID NO: 548 - DNA, 17 bp, Artificial sequence
  Synthetic oligonucleotide
acatatgtaatgtgatc

SEQ ID NO: 549 - DNA, 17 bp, Artificial sequence
  Synthetic oligonucleotide
tgctatggaacaatatc

SEQ ID NO: 550 - DNA, 17 bp, Artificial sequence
  Synthetic oligonucleotide
caattaataagaattac

SEQ ID NO: 551 - DNA, 17 bp, Artificial sequence
  Synthetic oligonucleotide
aaaaatgtgagaccttt

SEQ ID NO: 552 - DNA, 17 bp, Artificial sequence
  Synthetic oligonucleotide
gtagagagaatatgtca

SEQ ID NO: 553 - DNA, 17 bp, Artificial sequence
  Synthetic oligonucleotide
atcaagtggttgactta

SEQ ID NO: 554 - DNA, 17 bp, Artificial sequence
  Synthetic oligonucleotide
ctgaataagactaaatg

SEQ ID NO: 555 - DNA, 17 bp, Artificial sequence
  Synthetic oligonucleotide
ggctgaggcagcagcgg

SEQ ID NO: 556 - DNA, 17 bp, Artificial sequence
  Synthetic oligonucleotide
caacaaggctctgcctc

SEQ ID NO: 557 - DNA, 17 bp, Artificial sequence
  Synthetic oligonucleotide
acgcagttaaaagaacc

SEQ ID NO: 558 - DNA, 17 bp, Artificial sequence
  Synthetic oligonucleotide
tcagactagaagaggga

SEQ ID NO: 559 - DNA, 17 bp, Artificial sequence
  Synthetic oligonucleotide
ccccctgccccgccact

SEQ ID NO: 560 - DNA, 17 bp, Artificial sequence
  Synthetic oligonucleotide
agatgagcagatctctt

SEQ ID NO: 561 - DNA, 17 bp, Artificial sequence
  Synthetic oligonucleotide
gataatttcattaatca

SEQ ID NO: 562 - DNA, 17 bp, Artificial sequence
  Synthetic oligonucleotide
aggcaaaaaacttcaat

SEQ ID NO: 563 - DNA, 17 bp, Artificial sequence
  Synthetic oligonucleotide
tggtaaaatgtacacct

SEQ ID NO: 564 - DNA, 17 bp, Artificial sequence
  Synthetic oligonucleotide
cagcaatgaagcaaaca

SEQ ID NO: 565 - DNA, 17 bp, Artificial sequence
  Synthetic oligonucleotide
gaacaagcaacagaaac

SEQ ID NO: 566 - DNA, 17 bp, Artificial sequence
  Synthetic oligonucleotide
cgctagatgttttaatg

SEQ ID NO: 567 - DNA, 17 bp, Artificial sequence
  Synthetic oligonucleotide
aaatagaatactgagag

SEQ ID NO: 568 - DNA, 17 bp, Artificial sequence
  Synthetic oligonucleotide
acagagatattcttacc

SEQ ID NO: 569 - DNA, 17 bp, Artificial sequence
  Synthetic oligonucleotide
ctaaaaattaatcagtc

SEQ ID NO: 570 - DNA, 17 bp, Artificial sequence
  Synthetic oligonucleotide
attaaactttgaagacg

SEQ ID NO: 571 - DNA, 17 bp, Artificial sequence
  Synthetic oligonucleotide
acaaataagctaacact

SEQ ID NO: 572 - DNA, 17 bp, Artificial sequence
  Synthetic oligonucleotide
caaaaagtttttccatc

SEQ ID NO: 573 - DNA, 17 bp, Artificial sequence
  Synthetic oligonucleotide
acttactgaagagataa

SEQ ID NO: 574 - DNA, 17 bp, Artificial sequence
  Synthetic oligonucleotide
agaaaagcactacagta

SEQ ID NO: 575 - DNA, 17 bp, Artificial sequence
  Synthetic oligonucleotide
acaagatacatgcaatg

SEQ ID NO: 576 - DNA, 17 bp, Artificial sequence
  Synthetic oligonucleotide
cagcagaaaggtcttcc

SEQ ID NO: 577 - DNA, 17 bp, Artificial sequence
  Synthetic oligonucleotide
agagaaggcatattttt

SEQ ID NO: 578 - DNA, 17 bp, Artificial sequence
  Synthetic oligonucleotide
gaagataagcaaatgca

SEQ ID NO: 579 - DNA, 17 bp, Artificial sequence
  Synthetic oligonucleotide
cagcaaaggaaatttct

SEQ ID NO: 580 - DNA, 17 bp, Artificial sequence
  Synthetic oligonucleotide
ccttaaagtaatgaaac

SEQ ID NO: 581 - DNA, 17 bp, Artificial sequence
  Synthetic oligonucleotide
ttaaataaggtaatcat

SEQ ID NO: 582 - DNA, 17 bp, Artificial sequence
  Synthetic oligonucleotide
gtaattacagaatttgt

SEQ ID NO: 583 - DNA, 17 bp, Artificial sequence
  Synthetic oligonucleotide
actgaaatagtgcttgt

SEQ ID NO: 584 - DNA, 17 bp, Artificial sequence
  Synthetic oligonucleotide
atatgaacaggttatat

SEQ ID NO: 585 - DNA, 17 bp, Artificial sequence
  Synthetic oligonucleotide
ttctaaactacttttgt

SEQ ID NO: 586 - DNA, 17 bp, Artificial sequence
  Synthetic oligonucleotide
tgctaagaacctttaaa

SEQ ID NO: 587 - DNA, 17 bp, Artificial sequence
  Synthetic oligonucleotide
aactataaataaaccta

SEQ ID NO: 588 - DNA, 17 bp, Artificial sequence
  Synthetic oligonucleotide
tcaaaattagtgaatac

SEQ ID NO: 589 - DNA, 17 bp, Artificial sequence
  Synthetic oligonucleotide
gaacagaactgccaaaa

SEQ ID NO: 590 - DNA, 17 bp, Artificial sequence
  Synthetic oligonucleotide
ccaaagagcaagagcca

SEQ ID NO: 591 - DNA, 17 bp, Artificial sequence
  Synthetic oligonucleotide
ccataaggaactcctgc

SEQ ID NO: 592 - DNA, 17 bp, Artificial sequence
  Synthetic oligonucleotide
aagtattaattgcctcc

SEQ ID NO: 593 - DNA, 17 bp, Artificial sequence
  Synthetic oligonucleotide
ggagaataagaaactgc

SEQ ID NO: 594 - DNA, 17 bp, Artificial sequence
  Synthetic oligonucleotide
aatgaataaagtcaggg

SEQ ID NO: 595 - DNA, 17 bp, Artificial sequence
  Synthetic oligonucleotide
ctataacagtgccaggc

SEQ ID NO: 596 - DNA, 17 bp, Artificial sequence
  Synthetic oligonucleotide
taacactcgattaaccc

SEQ ID NO: 597 - DNA, 17 bp, Artificial sequence
  Synthetic oligonucleotide
tcacaaggtcggcggat

SEQ ID NO: 598 - DNA, 17 bp, Artificial sequence
  Synthetic oligonucleotide
gaacaccgtatttaaaa

SEQ ID NO: 599 - DNA, 17 bp, Artificial sequence
  Synthetic oligonucleotide
tcaaaagccatcatctg

SEQ ID NO: 600 - DNA, 17 bp, Artificial sequence
  Synthetic oligonucleotide
caggaagattttggacc

SEQ ID NO: 601 - DNA, 17 bp, Artificial sequence
  Synthetic oligonucleotide
actaaaatgacatcctt

SEQ ID NO: 602 - DNA, 17 bp, Artificial sequence
  Synthetic oligonucleotide
aggcaagtagtattggt

SEQ ID NO: 603 - DNA, 17 bp, Artificial sequence
  Synthetic oligonucleotide
cacataaatgccaatat

SEQ ID NO: 604 - DNA, 17 bp, Artificial sequence
  Synthetic oligonucleotide
cctaactggtttctgct

SEQ ID NO: 605 - DNA, 17 bp, Artificial sequence
  Synthetic oligonucleotide
ttatacttagcagagtt

SEQ ID NO: 606 - DNA, 17 bp, Artificial sequence
  Synthetic oligonucleotide
tgataacgcaagctact

SEQ ID NO: 607 - DNA, 17 bp, Artificial sequence
  Synthetic oligonucleotide
ccccagacttatttttg

SEQ ID NO: 608 - DNA, 17 bp, Artificial sequence
  Synthetic oligonucleotide
aggtaagtataagaaag

SEQ ID NO: 609 - DNA, 17 bp, Artificial sequence
  Synthetic oligonucleotide
aggaagggagagttttt

SEQ ID NO: 610 - DNA, 17 bp, Artificial sequence
  Synthetic oligonucleotide
caaaatagataaactcg

SEQ ID NO: 611 - DNA, 17 bp, Artificial sequence
  Synthetic oligonucleotide
gaataaagttggacttc

SEQ ID NO: 612 - DNA, 17 bp, Artificial sequence
  Synthetic oligonucleotide
cgattaattttcaacaa

SEQ ID NO: 613 - DNA, 17 bp, Artificial sequence
  Synthetic oligonucleotide
atacaattaaggacgat

SEQ ID NO: 614 - DNA, 17 bp, Artificial sequence
  Synthetic oligonucleotide
acataaagaccaacagg

SEQ ID NO: 615 - DNA, 17 bp, Artificial sequence
  Synthetic oligonucleotide
atttaaactgtgacaca

SEQ ID NO: 616 - DNA, 17 bp, Artificial sequence
  Synthetic oligonucleotide
taagatgcgaatactcc

SEQ ID NO: 617 - DNA, 17 bp, Artificial sequence
  Synthetic oligonucleotide
cgaaatacttacaatct

SEQ ID NO: 618 - DNA, 17 bp, Artificial sequence
  Synthetic oligonucleotide
tcatacatattgcttat

SEQ ID NO: 619 - DNA, 17 bp, Artificial sequence
  Synthetic oligonucleotide
ttttaaatggttgacca

SEQ ID NO: 620 - DNA, 17 bp, Artificial sequence
  Synthetic oligonucleotide
ttttaacctaggagtgg

SEQ ID NO: 621 - DNA, 17 bp, Artificial sequence
  Synthetic oligonucleotide
gcaagaagggctttgtt

SEQ ID NO: 622 - DNA, 17 bp, Artificial sequence
  Synthetic oligonucleotide
caagaaacacttttgtt

SEQ ID NO: 623 - DNA, 17 bp, Artificial sequence
  Synthetic oligonucleotide
catattaaaatctggga

SEQ ID NO: 624 - DNA, 17 bp, Artificial sequence
  Synthetic oligonucleotide
atacatatgtaatgtga

SEQ ID NO: 625 - DNA, 17 bp, Artificial sequence
  Synthetic oligonucleotide
aattacaggtactgcta

SEQ ID NO: 626 - DNA, 17 bp, Artificial sequence
  Synthetic oligonucleotide
gcaattaataagaatta

SEQ ID NO: 627 - DNA, 17 bp, Artificial sequence
  Synthetic oligonucleotide
caaaaatgtgagacctt

SEQ ID NO: 628 - DNA, 17 bp, Artificial sequence
  Synthetic oligonucleotide
aggtagagagaatatgt

SEQ ID NO: 629 - DNA, 17 bp, Artificial sequence
  Synthetic oligonucleotide
tatcaagtggttgactt

SEQ ID NO: 630 - DNA, 17 bp, Artificial sequence
  Synthetic oligonucleotide
tctgaataagactaaat

SEQ ID NO: 631 - DNA, 17 bp, Artificial sequence
  Synthetic oligonucleotide
ggacagggagctgcagc

SEQ ID NO: 632 - DNA, 17 bp, Artificial sequence
  Synthetic oligonucleotide
cccaacaaggctctgcc

SEQ ID NO: 633 - DNA, 17 bp, Artificial sequence
  Synthetic oligonucleotide
ccccacatctctccagc

SEQ ID NO: 634 - DNA, 17 bp, Artificial sequence
  Synthetic oligonucleotide
ggacgcgccctcactcc

SEQ ID NO: 635 - DNA, 17 bp, Artificial sequence
  Synthetic oligonucleotide
ctcaaatctcaggctgt

SEQ ID NO: 636 - DNA, 17 bp, Artificial sequence
  Synthetic oligonucleotide
gcttagatgagcagatc

SEQ ID NO: 637 - DNA, 17 bp, Artificial sequence
  Synthetic oligonucleotide
acataggcaaaaaactt

SEQ ID NO: 638 - DNA, 17 bp, Artificial sequence
  Synthetic oligonucleotide
gaatactggtaaaatgt

SEQ ID NO: 639 - DNA, 17 bp, Artificial sequence
  Synthetic oligonucleotide
taacaagctgtcagcaa

SEQ ID NO: 640 - DNA, 17 bp, Artificial sequence
  Synthetic oligonucleotide
caagaacaagcaacaga

SEQ ID NO: 641 - DNA, 17 bp, Artificial sequence
  Synthetic oligonucleotide
ttccagggaaagtcctg

SEQ ID NO: 642 - DNA, 17 bp, Artificial sequence
  Synthetic oligonucleotide
ggaaatagaatactgag

SEQ ID NO: 643 - DNA, 17 bp, Artificial sequence
  Synthetic oligonucleotide
taacagagatattctta

SEQ ID NO: 644 - DNA, 17 bp, Artificial sequence
  Synthetic oligonucleotide
actaaaaattaatcagt

SEQ ID NO: 645 - DNA, 17 bp, Artificial sequence
  Synthetic oligonucleotide
aattaaactttgaagac

SEQ ID NO: 646 - DNA, 17 bp, Artificial sequence
  Synthetic oligonucleotide
aacaaataagctaacac

SEQ ID NO: 647 - DNA, 17 bp, Artificial sequence
  Synthetic oligonucleotide
ccaaaaagtttttccat

SEQ ID NO: 648 - DNA, 17 bp, Artificial sequence
  Synthetic oligonucleotide
gaaattacttactgaag

SEQ ID NO: 649 - DNA, 17 bp, Artificial sequence
  Synthetic oligonucleotide
tagaaaagcactacagt

SEQ ID NO: 650 - DNA, 17 bp, Artificial sequence
  Synthetic oligonucleotide
cacaagatacatgcaat

SEQ ID NO: 651 - DNA, 17 bp, Artificial sequence
  Synthetic oligonucleotide
gatcaagtgtctgaagc

SEQ ID NO: 652 - DNA, 17 bp, Artificial sequence
  Synthetic oligonucleotide
cataagaaagagaaggc

SEQ ID NO: 653 - DNA, 17 bp, Artificial sequence
  Synthetic oligonucleotide
tgaagataagcaaatgc

SEQ ID NO: 654 - DNA, 17 bp, Artificial sequence
  Synthetic oligonucleotide
gtcaaggcagcaaagga

SEQ ID NO: 655 - DNA, 17 bp, Artificial sequence
  Synthetic oligonucleotide
accttaaagtaatgaaa

SEQ ID NO: 656 - DNA, 17 bp, Artificial sequence
  Synthetic oligonucleotide
tttaaataaggtaatca

SEQ ID NO: 657 - DNA, 17 bp, Artificial sequence
  Synthetic oligonucleotide
tgtaattacagaatttg

SEQ ID NO: 658 - DNA, 17 bp, Artificial sequence
  Synthetic oligonucleotide
aggaactgaaatagtgc

SEQ ID NO: 659 - DNA, 17 bp, Artificial sequence
  Synthetic oligonucleotide
acaatatgaacaggtta

SEQ ID NO: 660 - DNA, 17 bp, Artificial sequence
  Synthetic oligonucleotide
tattattctaaactact

SEQ ID NO: 661 - DNA, 17 bp, Artificial sequence
  Synthetic oligonucleotide
acctaatgcagttgatt

SEQ ID NO: 662 - DNA, 17 bp, Artificial sequence
  Synthetic oligonucleotide
tgacaaatatgcatttt

SEQ ID NO: 663 - DNA, 17 bp, Artificial sequence
  Synthetic oligonucleotide
ctcaaaattagtgaata

SEQ ID NO: 664 - DNA, 17 bp, Artificial sequence
  Synthetic oligonucleotide
gagaagaggattttttg

SEQ ID NO: 665 - DNA, 17 bp, Artificial sequence
  Synthetic oligonucleotide
caccaaagagcaagagc

SEQ ID NO: 666 - DNA, 17 bp, Artificial sequence
  Synthetic oligonucleotide
ccccataaggaactcct

SEQ ID NO: 667 - DNA, 17 bp, Artificial sequence
  Synthetic oligonucleotide
agcaagtattaattgcc

SEQ ID NO: 668 - DNA, 17 bp, Artificial sequence
  Synthetic oligonucleotide
tctgaaggagaataaga

SEQ ID NO: 669 - DNA, 17 bp, Artificial sequence
  Synthetic oligonucleotide
gaatgaataaagtcagg

SEQ ID NO: 670 - DNA, 17 bp, Artificial sequence
  Synthetic oligonucleotide
cctataacagtgccagg

SEQ ID NO: 671 - DNA, 17 bp, Artificial sequence
  Synthetic oligonucleotide
aataagttaacactcga

SEQ ID NO: 672 - DNA, 17 bp, Artificial sequence
  Synthetic oligonucleotide
gatcacaaggtcggcgg

SEQ ID NO: 673 - DNA, 17 bp, Artificial sequence
  Synthetic oligonucleotide
aaaaaagctgtcttctc

SEQ ID NO: 674 - DNA, 17 bp, Artificial sequence
  Synthetic oligonucleotide
ctcaaaagccatcatct

SEQ ID NO: 675 - DNA, 17 bp, Artificial sequence
  Synthetic oligonucleotide
aaacaggaagattttgg

SEQ ID NO: 676 - DNA, 17 bp, Artificial sequence
  Synthetic oligonucleotide
aactaaaatgacatcct

SEQ ID NO: 677 - DNA, 17 bp, Artificial sequence
  Synthetic oligonucleotide
tacaaggcaagtagtat

SEQ ID NO: 678 - DNA, 17 bp, Artificial sequence
  Synthetic oligonucleotide
tcacataaatgccaata

SEQ ID NO: 679 - DNA, 17 bp, Artificial sequence
  Synthetic oligonucleotide
tcctaactggtttctgc

SEQ ID NO: 680 - DNA, 17 bp, Artificial sequence
  Synthetic oligonucleotide
tgttatacttagcagag

SEQ ID NO: 681 - DNA, 17 bp, Artificial sequence
  Synthetic oligonucleotide
atacaaacctgataacg

SEQ ID NO: 682 - DNA, 17 bp, Artificial sequence
  Synthetic oligonucleotide
cttaacttattgttgaa

SEQ ID NO: 683 - DNA, 17 bp, Artificial sequence
  Synthetic oligonucleotide
tgcaaggtaagtataag

SEQ ID NO: 684 - DNA, 17 bp, Artificial sequence
  Synthetic oligonucleotide
ccaaaggaagggagagt

SEQ ID NO: 685 - DNA, 17 bp, Artificial sequence
  Synthetic oligonucleotide
cagcaaccaaagacaaa

SEQ ID NO: 686 - DNA, 17 bp, Artificial sequence
  Synthetic oligonucleotide
agaataaagttggactt

SEQ ID NO: 687 - DNA, 17 bp, Artificial sequence
  Synthetic oligonucleotide
acgattaattttcaaca

SEQ ID NO: 688 - DNA, 17 bp, Artificial sequence
  Synthetic oligonucleotide
tatacaattaaggacga

SEQ ID NO: 689 - DNA, 17 bp, Artificial sequence
  Synthetic oligonucleotide
gacataaagaccaacag

SEQ ID NO: 690 - DNA, 17 bp, Artificial sequence
  Synthetic oligonucleotide
tgaatttaaactgtgac

SEQ ID NO: 691 - DNA, 17 bp, Artificial sequence
  Synthetic oligonucleotide
tcataggtggaagacaa

SEQ ID NO: 692 - DNA, 17 bp, Artificial sequence
  Synthetic oligonucleotide
ccgaaatacttacaatc

SEQ ID NO: 693 - DNA, 17 bp, Artificial sequence
  Synthetic oligonucleotide
actcatacatattgctt

SEQ ID NO: 694 - DNA, 17 bp, Artificial sequence
  Synthetic oligonucleotide
tcacaagctaagaaatg

SEQ ID NO: 695 - DNA, 17 bp, Artificial sequence
  Synthetic oligonucleotide
tatcatattttaaccta

SEQ ID NO: 696 - DNA, 17 bp, Artificial sequence
  Synthetic oligonucleotide
tgcaagaagggctttgt

SEQ ID NO: 697 - DNA, 17 bp, Artificial sequence
  Synthetic oligonucleotide
cacaagaaacacttttg

SEQ ID NO: 698 - DNA, 17 bp, Artificial sequence
  Synthetic oligonucleotide
gcatattaaaatctggg

SEQ ID NO: 699 - DNA, 17 bp, Artificial sequence
  Synthetic oligonucleotide
aatacatatgtaatgtg

SEQ ID NO: 700 - DNA, 17 bp, Artificial sequence
  Synthetic oligonucleotide
gaattacaggtactgct

SEQ ID NO: 701 - DNA, 17 bp, Artificial sequence
  Synthetic oligonucleotide
agcaattaataagaatt

SEQ ID NO: 702 - DNA, 17 bp, Artificial sequence
  Synthetic oligonucleotide
acaaaaatgtgagacct

SEQ ID NO: 703 - DNA, 17 bp, Artificial sequence
  Synthetic oligonucleotide
tctcaaggtagagagaa

SEQ ID NO: 704 - DNA, 17 bp, Artificial sequence
  Synthetic oligonucleotide
tcaaaggtagtttatca

SEQ ID NO: 705 - DNA, 17 bp, Artificial sequence
  Synthetic oligonucleotide
ctttataaggtatttta

SEQ ID NO: 706 - DNA, 17 bp, Artificial sequence
  Synthetic oligonucleotide
ccgcaggctgcagggtt

SEQ ID NO: 707 - DNA, 17 bp, Artificial sequence
  Synthetic oligonucleotide
ccccaacaaggctctgc

SEQ ID NO: 708 - DNA, 17 bp, Artificial sequence
  Synthetic oligonucleotide
tcacaacgcagttaaaa

SEQ ID NO: 709 - DNA, 17 bp, Artificial sequence
  Synthetic oligonucleotide
cattatgtcatccactg

SEQ ID NO: 710 - DNA, 17 bp, Artificial sequence
  Synthetic oligonucleotide
tcccattggacgcgccc

SEQ ID NO: 711 - DNA, 17 bp, Artificial sequence
  Synthetic oligonucleotide
gacaatgtaggaagagc

SEQ ID NO: 712 - DNA, 17 bp, Artificial sequence
  Synthetic oligonucleotide
cttaggcttagatgagc

SEQ ID NO: 713 - DNA, 17 bp, Artificial sequence
  Synthetic oligonucleotide
tggaatactggtaaaat

SEQ ID NO: 714 - DNA, 17 bp, Artificial sequence
  Synthetic oligonucleotide
caaaaagtaacaagctg

SEQ ID NO: 715 - DNA, 17 bp, Artificial sequence
  Synthetic oligonucleotide
ccaagaacaagcaacag

SEQ ID NO: 716 - DNA, 17 bp, Artificial sequence
  Synthetic oligonucleotide
gtacactcgacacacag

SEQ ID NO: 717 - DNA, 17 bp, Artificial sequence
  Synthetic oligonucleotide
cggaaatagaatactga

SEQ ID NO: 718 - DNA, 17 bp, Artificial sequence
  Synthetic oligonucleotide
cttaacagagatattct

SEQ ID NO: 719 - DNA, 17 bp, Artificial sequence
  Synthetic oligonucleotide
gaacaagaaatattact

SEQ ID NO: 720 - DNA, 17 bp, Artificial sequence
  Synthetic oligonucleotide
taattaaactttgaaga

SEQ ID NO: 721 - DNA, 17 bp, Artificial sequence
  Synthetic oligonucleotide
caacaaataagctaaca

SEQ ID NO: 722 - DNA, 17 bp, Artificial sequence
  Synthetic oligonucleotide
tccaaaaagtttttcca

SEQ ID NO: 723 - DNA, 17 bp, Artificial sequence
  Synthetic oligonucleotide
agtaaatttctggatga

SEQ ID NO: 724 - DNA, 17 bp, Artificial sequence
  Synthetic oligonucleotide
ctagaaaagcactacag

SEQ ID NO: 725 - DNA, 17 bp, Artificial sequence
  Synthetic oligonucleotide
acacaagatacatgcaa

SEQ ID NO: 726 - DNA, 17 bp, Artificial sequence
  Synthetic oligonucleotide
ttagaatgatcaagtgt

SEQ ID NO: 727 - DNA, 17 bp, Artificial sequence
  Synthetic oligonucleotide
gcataagaaagagaagg

SEQ ID NO: 728 - DNA, 17 bp, Artificial sequence
  Synthetic oligonucleotide
ttgaagataagcaaatg

SEQ ID NO: 729 - DNA, 17 bp, Artificial sequence
  Synthetic oligonucleotide
tgtcaaggcagcaaagg

SEQ ID NO: 730 - DNA, 17 bp, Artificial sequence
  Synthetic oligonucleotide
tatattaccttaaagta

SEQ ID NO: 731 - DNA, 17 bp, Artificial sequence
  Synthetic oligonucleotide
tcggattaaaggtgtaa

SEQ ID NO: 732 - DNA, 17 bp, Artificial sequence
  Synthetic oligonucleotide
ttaattattgccctttt

SEQ ID NO: 733 - DNA, 17 bp, Artificial sequence
  Synthetic oligonucleotide
atacatgaggaactgaa

SEQ ID NO: 734 - DNA, 17 bp, Artificial sequence
  Synthetic oligonucleotide
tacaatatgaacaggtt

SEQ ID NO: 735 - DNA, 17 bp, Artificial sequence
  Synthetic oligonucleotide
atattattctaaactac

SEQ ID NO: 736 - DNA, 17 bp, Artificial sequence
  Synthetic oligonucleotide
aataaacctaatgcagt

SEQ ID NO: 737 - DNA, 17 bp, Artificial sequence
  Synthetic oligonucleotide
atacagagaaatatgac

SEQ ID NO: 738 - DNA, 17 bp, Artificial sequence
  Synthetic oligonucleotide
actcaaaattagtgaat

SEQ ID NO: 739 - DNA, 17 bp, Artificial sequence
  Synthetic oligonucleotide
catcaatcttactttga

SEQ ID NO: 740 - DNA, 17 bp, Artificial sequence
  Synthetic oligonucleotide
ataaactgaggcccatg

SEQ ID NO: 741 - DNA, 17 bp, Artificial sequence
  Synthetic oligonucleotide
tgctagatttgctgagc

SEQ ID NO: 742 - DNA, 17 bp, Artificial sequence
  Synthetic oligonucleotide
aagcaagtattaattgc

SEQ ID NO: 743 - DNA, 17 bp, Artificial sequence
  Synthetic oligonucleotide
cagataggaatctgaag

SEQ ID NO: 744 - DNA, 17 bp, Artificial sequence
  Synthetic oligonucleotide
gatgaatgaataaagtc

SEQ ID NO: 745 - DNA, 17 bp, Artificial sequence
  Synthetic oligonucleotide
acctataacagtgccag

SEQ ID NO: 746 - DNA, 17 bp, Artificial sequence
  Synthetic oligonucleotide
aaataagttaacactcg

SEQ ID NO: 747 - DNA, 17 bp, Artificial sequence
  Synthetic oligonucleotide
aaaatatcaacactggc

SEQ ID NO: 748 - DNA, 17 bp, Artificial sequence
  Synthetic oligonucleotide
ttaaagagcaagacctt

SEQ ID NO: 749 - DNA, 17 bp, Artificial sequence
  Synthetic oligonucleotide
tcttaactcgcttgagg

SEQ ID NO: 750 - DNA, 17 bp, Artificial sequence
  Synthetic oligonucleotide
gaaacaggaagattttg

SEQ ID NO: 751 - DNA, 17 bp, Artificial sequence
  Synthetic oligonucleotide
cccaactaaaatgacat

SEQ ID NO: 752 - DNA, 17 bp, Artificial sequence
  Synthetic oligonucleotide
ctacaaggcaagtagta

SEQ ID NO: 753 - DNA, 17 bp, Artificial sequence
  Synthetic oligonucleotide
actcacataaatgccaa

SEQ ID NO: 754 - DNA, 17 bp, Artificial sequence
  Synthetic oligonucleotide
acagaacccaccatgct

SEQ ID NO: 755 - DNA, 17 bp, Artificial sequence
  Synthetic oligonucleotide
ctaaattgttatactta

SEQ ID NO: 756 - DNA, 17 bp, Artificial sequence
  Synthetic oligonucleotide
gctgaatacaaacctga

SEQ ID NO: 757 - DNA, 17 bp, Artificial sequence
  Synthetic oligonucleotide
aaagaaagagcctgggt

SEQ ID NO: 758 - DNA, 17 bp, Artificial sequence
  Synthetic oligonucleotide
ttgcaaggtaagtataa

SEQ ID NO: 759 - DNA, 17 bp, Artificial sequence
  Synthetic oligonucleotide
tccaaaggaagggagag

SEQ ID NO: 760 - DNA, 17 bp, Artificial sequence
  Synthetic oligonucleotide
ttagatatgacacttga

SEQ ID NO: 761 - DNA, 17 bp, Artificial sequence
  Synthetic oligonucleotide
taagataattccatggg

SEQ ID NO: 762 - DNA, 17 bp, Artificial sequence
  Synthetic oligonucleotide
gacgattaattttcaac

SEQ ID NO: 763 - DNA, 17 bp, Artificial sequence
  Synthetic oligonucleotide
ttatacaattaaggacg

SEQ ID NO: 764 - DNA, 17 bp, Artificial sequence
  Synthetic oligonucleotide
cgacataaagaccaaca

SEQ ID NO: 765 - DNA, 17 bp, Artificial sequence
  Synthetic oligonucleotide
catgaatttaaactgtg

SEQ ID NO: 766 - DNA, 17 bp, Artificial sequence
  Synthetic oligonucleotide
cacaaagtttgcccatg

SEQ ID NO: 767 - DNA, 17 bp, Artificial sequence
  Synthetic oligonucleotide
cccgaaatacttacaat

SEQ ID NO: 768 - DNA, 17 bp, Artificial sequence
  Synthetic oligonucleotide
gaacacagacactcata

SEQ ID NO: 769 - DNA, 17 bp, Artificial sequence
  Synthetic oligonucleotide
ctgcatatttttggcta

SEQ ID NO: 770 - DNA, 17 bp, Artificial sequence
  Synthetic oligonucleotide
tccaaatgtggtcctat

SEQ ID NO: 771 - DNA, 17 bp, Artificial sequence
  Synthetic oligonucleotide
acaaagatgacagactt

SEQ ID NO: 772 - DNA, 17 bp, Artificial sequence
  Synthetic oligonucleotide
acacaagaaacactttt

SEQ ID NO: 773 - DNA, 17 bp, Artificial sequence
  Synthetic oligonucleotide
tgcatattaaaatctgg

SEQ ID NO: 774 - DNA, 17 bp, Artificial sequence
  Synthetic oligonucleotide
tatgacacattgttaag

SEQ ID NO: 775 - DNA, 17 bp, Artificial sequence
  Synthetic oligonucleotide
agaattacaggtactgc

SEQ ID NO: 776 - DNA, 17 bp, Artificial sequence
  Synthetic oligonucleotide
tagcaattaataagaat

SEQ ID NO: 777 - DNA, 17 bp, Artificial sequence
  Synthetic oligonucleotide
cacaaaaatgtgagacc

SEQ ID NO: 778 - DNA, 17 bp, Artificial sequence
  Synthetic oligonucleotide
aggaaatggaggtgatg

SEQ ID NO: 779 - DNA, 17 bp, Artificial sequence
  Synthetic oligonucleotide
ttcaaaggtagtttatc

SEQ ID NO: 780 - DNA, 17 bp, Artificial sequence
  Synthetic oligonucleotide
gctttataaggtatttt

SEQ ID NO: 781 - DNA, 17 bp, Artificial sequence
  Synthetic oligonucleotide
cccaagtgagggagcgg

SEQ ID NO: 782 - DNA, 17 bp, Artificial sequence
  Synthetic oligonucleotide
ggcgagagggctgaggc

SEQ ID NO: 783 - DNA, 17 bp, Artificial sequence
  Synthetic oligonucleotide
tggcactgagcaaatct

SEQ ID NO: 784 - DNA, 17 bp, Artificial sequence
  Synthetic oligonucleotide
gcattatgtcatccact

SEQ ID NO: 785 - DNA, 17 bp, Artificial sequence
  Synthetic oligonucleotide
aaatctcccattggacg

SEQ ID NO: 786 - DNA, 17 bp, Artificial sequence
  Synthetic oligonucleotide
tgacaatgtaggaagag

SEQ ID NO: 787 - DNA, 17 bp, Artificial sequence
  Synthetic oligonucleotide
gaccaacttaggcttag

SEQ ID NO: 788 - DNA, 17 bp, Artificial sequence
  Synthetic oligonucleotide
tcctaatatttaagata

SEQ ID NO: 789 - DNA, 17 bp, Artificial sequence
  Synthetic oligonucleotide
acacataggcaaaaaac

SEQ ID NO: 790 - DNA, 17 bp, Artificial sequence
  Synthetic oligonucleotide
gcccacggagtctgcgg

SEQ ID NO: 791 - DNA, 17 bp, Artificial sequence
  Synthetic oligonucleotide
ccaaaaagtaacaagct

SEQ ID NO: 792 - DNA, 17 bp, Artificial sequence
  Synthetic oligonucleotide
cccaagaacaagcaaca

SEQ ID NO: 793 - DNA, 17 bp, Artificial sequence
  Synthetic oligonucleotide
tcctactgtacactcga

SEQ ID NO: 794 - DNA, 17 bp, Artificial sequence
  Synthetic oligonucleotide
tcggaaatagaatactg

SEQ ID NO: 795 - DNA, 17 bp, Artificial sequence
  Synthetic oligonucleotide
tcttaacagagatattc

SEQ ID NO: 796 - DNA, 17 bp, Artificial sequence
  Synthetic oligonucleotide
gatcataacagaaacaa

SEQ ID NO: 797 - DNA, 17 bp, Artificial sequence
  Synthetic oligonucleotide
tctaattaaactttgaa

SEQ ID NO: 798 - DNA, 17 bp, Artificial sequence
  Synthetic oligonucleotide
ctaaattttattccaac

SEQ ID NO: 799 - DNA, 17 bp, Artificial sequence
  Synthetic oligonucleotide
atccaaaaagtttttcc

SEQ ID NO: 800 - DNA, 17 bp, Artificial sequence
  Synthetic oligonucleotide
cagtaaatttctggatg

SEQ ID NO: 801 - DNA, 17 bp, Artificial sequence
  Synthetic oligonucleotide
cctagaaaagcactaca

SEQ ID NO: 802 - DNA, 17 bp, Artificial sequence
  Synthetic oligonucleotide
ttacacaagatacatgc

SEQ ID NO: 803 - DNA, 17 bp, Artificial sequence
  Synthetic oligonucleotide
ttttagaatgatcaagt

SEQ ID NO: 804 - DNA, 17 bp, Artificial sequence
  Synthetic oligonucleotide
gtcaaatcagcataaga

SEQ ID NO: 805 - DNA, 17 bp, Artificial sequence
  Synthetic oligonucleotide
atattttgaagataagc

SEQ ID NO: 806 - DNA, 17 bp, Artificial sequence
  Synthetic oligonucleotide
caaaatctatctccttt

SEQ ID NO: 807 - DNA, 17 bp, Artificial sequence
  Synthetic oligonucleotide
tcatatattaccttaaa

SEQ ID NO: 808 - DNA, 17 bp, Artificial sequence
  Synthetic oligonucleotide
tgtattacttatgcaaa

SEQ ID NO: 809 - DNA, 17 bp, Artificial sequence
  Synthetic oligonucleotide
attttaattattgccct

SEQ ID NO: 810 - DNA, 17 bp, Artificial sequence
  Synthetic oligonucleotide
gatacatgaggaactga

SEQ ID NO: 811 - DNA, 17 bp, Artificial sequence
  Synthetic oligonucleotide
ttacaatatgaacaggt

SEQ ID NO: 812 - DNA, 17 bp, Artificial sequence
  Synthetic oligonucleotide
gacaatgtgagactaca

SEQ ID NO: 813 - DNA, 17 bp, Artificial sequence
  Synthetic oligonucleotide
aaataaacctaatgcag

SEQ ID NO: 814 - DNA, 17 bp, Artificial sequence
  Synthetic oligonucleotide
gcaaaatacagagaaat

SEQ ID NO: 815 - DNA, 17 bp, Artificial sequence
  Synthetic oligonucleotide
atccaaactttgtgagc

SEQ ID NO: 816 - DNA, 17 bp, Artificial sequence
  Synthetic oligonucleotide
gaacagatactttctaa

SEQ ID NO: 817 - DNA, 17 bp, Artificial sequence
  Synthetic oligonucleotide
cataaactgaggcccat

SEQ ID NO: 818 - DNA, 17 bp, Artificial sequence
  Synthetic oligonucleotide
tcccaagcatgctagat

SEQ ID NO: 819 - DNA, 17 bp, Artificial sequence
  Synthetic oligonucleotide
ccagaagcaagtattaa

SEQ ID NO: 820 - DNA, 17 bp, Artificial sequence
  Synthetic oligonucleotide
caccagataggaatctg

SEQ ID NO: 821 - DNA, 17 bp, Artificial sequence
  Synthetic oligonucleotide
atatttactgatgaatg

SEQ ID NO: 822 - DNA, 17 bp, Artificial sequence
  Synthetic oligonucleotide
cacgagggcagagcttt

SEQ ID NO: 823 - DNA, 17 bp, Artificial sequence
  Synthetic oligonucleotide
aaaataagttaacactc

SEQ ID NO: 824 - DNA, 17 bp, Artificial sequence
  Synthetic oligonucleotide
taaaatatcaacactgg

SEQ ID NO: 825 - DNA, 17 bp, Artificial sequence
  Synthetic oligonucleotide
acgatagtgatactgca

SEQ ID NO: 826 - DNA, 17 bp, Artificial sequence
  Synthetic oligonucleotide
ttacactagactcttaa

SEQ ID NO: 827 - DNA, 17 bp, Artificial sequence
  Synthetic oligonucleotide
tgaaacaggaagatttt

SEQ ID NO: 828 - DNA, 17 bp, Artificial sequence
  Synthetic oligonucleotide
acccaactaaaatgaca

SEQ ID NO: 829 - DNA, 17 bp, Artificial sequence
  Synthetic oligonucleotide
atctacaaggcaagtag

SEQ ID NO: 830 - DNA, 17 bp, Artificial sequence
  Synthetic oligonucleotide
ttgaaattcagatcatg

SEQ ID NO: 831 - DNA, 17 bp, Artificial sequence
  Synthetic oligonucleotide
caaaatccagtcagtca

SEQ ID NO: 832 - DNA, 17 bp, Artificial sequence
  Synthetic oligonucleotide
gctaaattgttatactt

SEQ ID NO: 833 - DNA, 17 bp, Artificial sequence
  Synthetic oligonucleotide
agctgaatacaaacctg

SEQ ID NO: 834 - DNA, 17 bp, Artificial sequence
  Synthetic oligonucleotide
taagaaagagcctgggt

SEQ ID NO: 835 - DNA, 17 bp, Artificial sequence
  Synthetic oligonucleotide
aacaagggtttgcaagg

SEQ ID NO: 836 - DNA, 17 bp, Artificial sequence
  Synthetic oligonucleotide
atccaaaggaagggaga

SEQ ID NO: 837 - DNA, 17 bp, Artificial sequence
  Synthetic oligonucleotide
agtaaacctttttgact

SEQ ID NO: 838 - DNA, 17 bp, Artificial sequence
  Synthetic oligonucleotide
ctaagataattccatgg

SEQ ID NO: 839 - DNA, 17 bp, Artificial sequence
  Synthetic oligonucleotide
taaggacgattaatttt

SEQ ID NO: 840 - DNA, 17 bp, Artificial sequence
  Synthetic oligonucleotide
atttatacaattaagga

SEQ ID NO: 841 - DNA, 17 bp, Artificial sequence
  Synthetic oligonucleotide
tcgacataaagaccaac

SEQ ID NO: 842 - DNA, 17 bp, Artificial sequence
  Synthetic oligonucleotide
ggccaaatcaatcttga

SEQ ID NO: 843 - DNA, 17 bp, Artificial sequence
  Synthetic oligonucleotide
acacaaagtttgcccat

SEQ ID NO: 844 - DNA, 17 bp, Artificial sequence
  Synthetic oligonucleotide
gcccgaaatacttacaa

SEQ ID NO: 845 - DNA, 17 bp, Artificial sequence
  Synthetic oligonucleotide
taataaaattctattgg

SEQ ID NO: 846 - DNA, 17 bp, Artificial sequence
  Synthetic oligonucleotide
ctataacctgcatattt

SEQ ID NO: 847 - DNA, 17 bp, Artificial sequence
  Synthetic oligonucleotide
tactagggaggccgtgc

SEQ ID NO: 848 - DNA, 17 bp, Artificial sequence
  Synthetic oligonucleotide
gacaaagatgacagact

SEQ ID NO: 849 - DNA, 17 bp, Artificial sequence
  Synthetic oligonucleotide
gaagacacaagaaacac

SEQ ID NO: 850 - DNA, 17 bp, Artificial sequence
  Synthetic oligonucleotide
atgcatattaaaatctg

SEQ ID NO: 851 - DNA, 17 bp, Artificial sequence
  Synthetic oligonucleotide
caatatctatgacacat

SEQ ID NO: 852 - DNA, 17 bp, Artificial sequence
  Synthetic oligonucleotide
aagaattacaggtactg

SEQ ID NO: 853 - DNA, 17 bp, Artificial sequence
  Synthetic oligonucleotide
ctaaaatattacatagc

SEQ ID NO: 854 - DNA, 17 bp, Artificial sequence
  Synthetic oligonucleotide
ccacaaaaatgtgagac

SEQ ID NO: 855 - DNA, 17 bp, Artificial sequence
  Synthetic oligonucleotide
ttacaggaaatggaggt

SEQ ID NO: 856 - DNA, 17 bp, Artificial sequence
  Synthetic oligonucleotide
attcaaaggtagtttat

SEQ ID NO: 857 - DNA, 17 bp, Artificial sequence
  Synthetic oligonucleotide
tgctttataaggtattt

SEQ ID NO: 858 - DNA, 20 bp, Artificial sequence
  Synthetic oligonucleotide
ctcagtaacattgacaccac

SEQ ID NO: 859 - DNA, 20 bp, Artificial sequence
  Synthetic oligonucleotide
atgaaacaaaatctatctcc

SEQ ID NO: 860 - DNA, 20 bp, Artificial sequence
  Synthetic oligonucleotide
aaaacacttcttccccacta

SEQ ID NO: 861 - DNA, 20 bp, Artificial sequence
  Synthetic oligonucleotide
tgaatttattctttttccct

SEQ ID NO: 862 - DNA, 20 bp, Artificial sequence
  Synthetic oligonucleotide
ctgaaaccataattaagtca

SEQ ID NO: 863 - DNA, 20 bp, Artificial sequence
  Synthetic oligonucleotide
acaaaagttatacttgctca

SEQ ID NO: 864 - DNA, 20 bp, Artificial sequence
  Synthetic oligonucleotide
gtcatggtttcaactctcaa

SEQ ID NO: 865 - DNA, 20 bp, Artificial sequence
  Synthetic oligonucleotide
tatgtatttattcttgcagt

SEQ ID NO: 866 - DNA, 20 bp, Artificial sequence
  Synthetic oligonucleotide
tacacatatttcaaacatca

SEQ ID NO: 867 - DNA, 20 bp, Artificial sequence
  Synthetic oligonucleotide
catgtcaatttctatccccc

SEQ ID NO: 868 - DNA, 20 bp, Artificial sequence
  Synthetic oligonucleotide
gtcaatactttccccaagtt

SEQ ID NO: 869 - DNA, 20 bp, Artificial sequence
  Synthetic oligonucleotide
cccttttttccccttcaccc

SEQ ID NO: 870 - DNA, 20 bp, Artificial sequence
  Synthetic oligonucleotide
agcaacaaacatcatcatct

SEQ ID NO: 871 - DNA, 20 bp, Artificial sequence
  Synthetic oligonucleotide
gcactcagatatactcctgc

SEQ ID NO: 872 - DNA, 20 bp, Artificial sequence
  Synthetic oligonucleotide
ttattccaaatcattcagct

SEQ ID NO: 873 - DNA, 20 bp, Artificial sequence
  Synthetic oligonucleotide
accacattcacctccctctc

SEQ ID NO: 874 - DNA, 20 bp, Artificial sequence
  Synthetic oligonucleotide
gcgattttaaatcctcacac

SEQ ID NO: 875 - DNA, 20 bp, Artificial sequence
  Synthetic oligonucleotide
gccaacttaacccattgccg

SEQ ID NO: 876 - DNA, 20 bp, Artificial sequence
  Synthetic oligonucleotide
cagtcaagtataacttttca

SEQ ID NO: 877 - DNA, 20 bp, Artificial sequence
  Synthetic oligonucleotide
agttcaagttcttaaccgac

SEQ ID NO: 878 - DNA, 20 bp, Artificial sequence
  Synthetic oligonucleotide
aggcatttcaaacttacgac

SEQ ID NO: 879 - DNA, 20 bp, Artificial sequence
  Synthetic oligonucleotide
actattttatcatattggtc

SEQ ID NO: 880 - DNA, 20 bp, Artificial sequence
  Synthetic oligonucleotide
ggatgacaacattattgagc

SEQ ID NO: 881 - DNA, 20 bp, Artificial sequence
  Synthetic oligonucleotide
gtataaccatatttcaccct

SEQ ID NO: 882 - DNA, 20 bp, Artificial sequence
  Synthetic oligonucleotide
gccaccattttcctagtaaa

SEQ ID NO: 883 - DNA, 20 bp, Artificial sequence
  Synthetic oligonucleotide
cactcattcccactacatta

SEQ ID NO: 884 - DNA, 20 bp, Artificial sequence
  Synthetic oligonucleotide
ccagatagttctcatcccaa

SEQ ID NO: 885 - DNA, 20 bp, Artificial sequence
  Synthetic oligonucleotide
agactcacttttactggctt

SEQ ID NO: 886 - DNA, 20 bp, Artificial sequence
  Synthetic oligonucleotide
ctgtatttcaccaatactca

SEQ ID NO: 887 - DNA, 20 bp, Artificial sequence
  Synthetic oligonucleotide
gcacaagtttattagtgatc

SEQ ID NO: 888 - DNA, 20 bp, Artificial sequence
  Synthetic oligonucleotide
tctcagaatcctacttggct

SEQ ID NO: 889 - DNA, 20 bp, Artificial sequence
  Synthetic oligonucleotide
ttggaccttacttcttacta

SEQ ID NO: 890 - DNA, 20 bp, Artificial sequence
  Synthetic oligonucleotide
gggaacactttccttctgca

SEQ ID NO: 891 - DNA, 20 bp, Artificial sequence
  Synthetic oligonucleotide
gtacagctcttcctagactc

SEQ ID NO: 892 - DNA, 20 bp, Artificial sequence
  Synthetic oligonucleotide
tcacctctccagctacactt

SEQ ID NO: 893 - DNA, 20 bp, Artificial sequence
  Synthetic oligonucleotide
ccgtacaaatctatatcctt

SEQ ID NO: 894 - DNA, 20 bp, Artificial sequence
  Synthetic oligonucleotide
tggatggttactaattgcct

SEQ ID NO: 895 - DNA, 20 bp, Artificial sequence
  Synthetic oligonucleotide
tctctttttaatattaggta

SEQ ID NO: 896 - DNA, 20 bp, Artificial sequence
  Synthetic oligonucleotide
ttcacattcaatcaaccagt

SEQ ID NO: 897 - DNA, 20 bp, Artificial sequence
  Synthetic oligonucleotide
ttcatcactccaattttcaa

SEQ ID NO: 898 - DNA, 20 bp, Artificial sequence
  Synthetic oligonucleotide
aacatacattcctcttacct

SEQ ID NO: 899 - DNA, 20 bp, Artificial sequence
  Synthetic oligonucleotide
ctgataggaattcatggtca

SEQ ID NO: 900 - DNA, 20 bp, Artificial sequence
  Synthetic oligonucleotide
agtcaggtatttactatgta

SEQ ID NO: 901 - DNA, 20 bp, Artificial sequence
  Synthetic oligonucleotide
actctgacccctcagtgaca

SEQ ID NO: 902 - DNA, 20 bp, Artificial sequence
  Synthetic oligonucleotide
gtcacaaatataaatatcta

SEQ ID NO: 903 - DNA, 20 bp, Artificial sequence
  Synthetic oligonucleotide
gtcatttacattcctggagt

SEQ ID NO: 904 - DNA, 20 bp, Artificial sequence
  Synthetic oligonucleotide
ttctgatttttctaagcaga

SEQ ID NO: 905 - DNA, 20 bp, Artificial sequence
  Synthetic oligonucleotide
aggacagtagccattaacca

SEQ ID NO: 906 - DNA, 20 bp, Artificial sequence
  Synthetic oligonucleotide
tgggaatttctaatttctgc

SEQ ID NO: 907 - DNA, 20 bp, Artificial sequence
  Synthetic oligonucleotide
cagcccaacacaccagcaca

SEQ ID NO: 908 - DNA, 20 bp, Artificial sequence
  Synthetic oligonucleotide
cgacatacaacataccccaa

SEQ ID NO: 909 - DNA, 20 bp, Artificial sequence
  Synthetic oligonucleotide
gctacaccctttttactcaa

SEQ ID NO: 910 - DNA, 20 bp, Artificial sequence
  Synthetic oligonucleotide
aagcaaagattccctgggca

SEQ ID NO: 911 - DNA, 20 bp, Artificial sequence
  Synthetic oligonucleotide
gcaaaagcccatttttcaaa

SEQ ID NO: 912 - DNA, 20 bp, Artificial sequence
  Synthetic oligonucleotide
ttctaaatcctcaccagcat

SEQ ID NO: 913 - DNA, 20 bp, Artificial sequence
  Synthetic oligonucleotide
acaactttagacatcaccca

SEQ ID NO: 914 - DNA, 20 bp, Artificial sequence
  Synthetic oligonucleotide
gacattgttcctcagtggca

SEQ ID NO: 915 - DNA, 20 bp, Artificial sequence
  Synthetic oligonucleotide
ggtcctcttaactattttta

SEQ ID NO: 916 - DNA, 20 bp, Artificial sequence
  Synthetic oligonucleotide
acttctctccttgccagcca

SEQ ID NO: 917 - DNA, 20 bp, Artificial sequence
  Synthetic oligonucleotide
ggctactgaaatctctatca

SEQ ID NO: 918 - DNA, 20 bp, Artificial sequence
  Synthetic oligonucleotide
ccatcacctgcaaccaggga

SEQ ID NO: 919 - DNA, 20 bp, Artificial sequence
  Synthetic oligonucleotide
aagccatattttctcaactt

SEQ ID NO: 920 - DNA, 20 bp, Artificial sequence
  Synthetic oligonucleotide
aggaagggaactactatctt

SEQ ID NO: 921 - DNA, 20 bp, Artificial sequence
  Synthetic oligonucleotide
gcttgtcattttcaagtttc

SEQ ID NO: 922 - DNA, 20 bp, Artificial sequence
  Synthetic oligonucleotide
gacaaagtttataccttaac

SEQ ID NO: 923 - DNA, 20 bp, Artificial sequence
  Synthetic oligonucleotide
ggattatacaaccaaaacca

SEQ ID NO: 924 - DNA, 20 bp, Artificial sequence
  Synthetic oligonucleotide
gggtttagaccacattccca

SEQ ID NO: 925 - DNA, 20 bp, Artificial sequence
  Synthetic oligonucleotide
acacggatccctccagactc

SEQ ID NO: 926 - DNA, 20 bp, Artificial sequence
  Synthetic oligonucleotide
cttcacattttccccttgaa

SEQ ID NO: 927 - DNA, 20 bp, Artificial sequence
  Synthetic oligonucleotide
gtaagtcaaactaccaagca

SEQ ID NO: 928 - DNA, 20 bp, Artificial sequence
  Synthetic oligonucleotide
aactaaatttacctttggtt

SEQ ID NO: 929 - DNA, 20 bp, Artificial sequence
  Synthetic oligonucleotide
gaaatctaccatcaagctct

SEQ ID NO: 930 - DNA, 20 bp, Artificial sequence
  Synthetic oligonucleotide
actctttttccaattttgtg

SEQ ID NO: 931 - DNA, 20 bp, Artificial sequence
  Synthetic oligonucleotide
atcgagactcccaatgctct

SEQ ID NO: 932 - DNA, 20 bp, Artificial sequence
  Synthetic oligonucleotide
aacatgaattatttattcca

SEQ ID NO: 933 - DNA, 20 bp, Artificial sequence
  Synthetic oligonucleotide
tctcagggaatgctgtgcca

SEQ ID NO: 934 - DNA, 20 bp, Artificial sequence
  Synthetic oligonucleotide
gtaaagataacatatagctt

SEQ ID NO: 935 - DNA, 20 bp, Artificial sequence
  Synthetic oligonucleotide
acaagataacttccatttaa

SEQ ID NO: 936 - DNA, 20 bp, Artificial sequence
  Synthetic oligonucleotide
gcatggccaaatcaatcttg

SEQ ID NO: 937 - DNA, 20 bp, Artificial sequence
  Synthetic oligonucleotide
cccaaaatttatcttggtga

SEQ ID NO: 938 - DNA, 20 bp, Artificial sequence
  Synthetic oligonucleotide
gcagcagtcacttcatgctt

SEQ ID NO: 939 - DNA, 20 bp, Artificial sequence
  Synthetic oligonucleotide
ttcacattttccccttgaaa

SEQ ID NO: 940 - DNA, 20 bp, Artificial sequence
  Synthetic oligonucleotide
gccatattttctcaacttta

SEQ ID NO: 941 - DNA, 20 bp, Artificial sequence
  Synthetic oligonucleotide
atacaaccaaaaccaccctc

SEQ ID NO: 942 - DNA, 20 bp, Artificial sequence
  Synthetic oligonucleotide
gtttcaactctcaaacagca

SEQ ID NO: 943 - DNA, 20 bp, Artificial sequence
  Synthetic oligonucleotide
tcactccaattttcaaggcc

SEQ ID NO: 944 - DNA, 20 bp, Artificial sequence
  Synthetic oligonucleotide
tctttttccctttaattaca

SEQ ID NO: 945 - DNA, 20 bp, Artificial sequence
  Synthetic oligonucleotide
gcaacaaacatcatcatcta

SEQ ID NO: 946 - DNA, 20 bp, Artificial sequence
  Synthetic oligonucleotide
cgtacaaatctatatccttt

SEQ ID NO: 947 - DNA, 20 bp, Artificial sequence
  Synthetic oligonucleotide
tcaagtataacttttcatta

SEQ ID NO: 948 - DNA, 20 bp, Artificial sequence
  Synthetic oligonucleotide
acattgttcctcagtggcac

SEQ ID NO: 949 - DNA, 20 bp, Artificial sequence
  Synthetic oligonucleotide
atcttaaattttcaatcccc

SEQ ID NO: 950 - DNA, 20 bp, Artificial sequence
  Synthetic oligonucleotide
gatcttttcatctaaatgca

SEQ ID NO: 951 - DNA, 20 bp, Artificial sequence
  Synthetic oligonucleotide
ggcatttcaaacttacgaca

SEQ ID NO: 952 - DNA, 20 bp, Artificial sequence
  Synthetic oligonucleotide
tcctagactcatctgaggca

SEQ ID NO: 953 - DNA, 20 bp, Artificial sequence
  Synthetic oligonucleotide
tcattcagctaataagagca

SEQ ID NO: 954 - DNA, 20 bp, Artificial sequence
  Synthetic oligonucleotide
gctgaggttttccactccaa

SEQ ID NO: 955 - DNA, 20 bp, Artificial sequence
  Synthetic oligonucleotide
aagaacacttcttaccactt

SEQ ID NO: 956 - DNA, 20 bp, Artificial sequence
  Synthetic oligonucleotide
agggaactactatctttgtt

SEQ ID NO: 957 - DNA, 20 bp, Artificial sequence
  Synthetic oligonucleotide
acagtgtttcacatgtacca

SEQ ID NO: 958 - DNA, 20 bp, Artificial sequence
  Synthetic oligonucleotide
tctgtgtacatcagtcatta

SEQ ID NO: 959 - DNA, 20 bp, Artificial sequence
  Synthetic oligonucleotide
acatacattcctcttacctg

SEQ ID NO: 960 - DNA, 20 bp, Artificial sequence
  Synthetic oligonucleotide
tcttgggtttcaacttccct

SEQ ID NO: 961 - DNA, 20 bp, Artificial sequence
  Synthetic oligonucleotide
acatgaattatttattccaa

SEQ ID NO: 962 - DNA, 20 bp, Artificial sequence
  Synthetic oligonucleotide
gtttaggccatcatgctcca

SEQ ID NO: 963 - DNA, 20 bp, Artificial sequence
  Synthetic oligonucleotide
cacaaacaaattttacagca

SEQ ID NO: 964 - DNA, 20 bp, Artificial sequence
  Synthetic oligonucleotide
gtagaattttttctagaata

SEQ ID NO: 965 - DNA, 20 bp, Artificial sequence
  Synthetic oligonucleotide
tcttgcagttttaaaagctt

SEQ ID NO: 966 - DNA, 20 bp, Artificial sequence
  Synthetic oligonucleotide
ccttttttccccttcaccct

SEQ ID NO: 967 - DNA, 20 bp, Artificial sequence
  Synthetic oligonucleotide
agcaaggtcacagataaggc

SEQ ID NO: 968 - DNA, 20 bp, Artificial sequence
  Synthetic oligonucleotide
acacaggttatttcactcta

SEQ ID NO: 969 - DNA, 20 bp, Artificial sequence
  Synthetic oligonucleotide
gctctgctacttactcactc

SEQ ID NO: 970 - DNA, 20 bp, Artificial sequence
  Synthetic oligonucleotide
gcattcctcctctctcactg

SEQ ID NO: 971 - DNA, 20 bp, Artificial sequence
  Synthetic oligonucleotide
gccacaggactccctgacaa

SEQ ID NO: 972 - DNA, 20 bp, Artificial sequence
  Synthetic oligonucleotide
ccacattcacctccctctct

SEQ ID NO: 973 - DNA, 20 bp, Artificial sequence
  Synthetic oligonucleotide
actcagatatactcctgctc

SEQ ID NO: 974 - DNA, 20 bp, Artificial sequence
  Synthetic oligonucleotide
ccaccattcatttctagaat

SEQ ID NO: 975 - DNA, 20 bp, Artificial sequence
  Synthetic oligonucleotide
tggaccttacttcttactac

SEQ ID NO: 976 - DNA, 20 bp, Artificial sequence
  Synthetic oligonucleotide
ctgagattcttttcacagaa

SEQ ID NO: 977 - DNA, 20 bp, Artificial sequence
  Synthetic oligonucleotide
tttatttatttcaaaggtct

SEQ ID NO: 978 - DNA, 20 bp, Artificial sequence
  Synthetic oligonucleotide
aacaagttcaaaaatacctc

SEQ ID NO: 979 - DNA, 20 bp, Artificial sequence
  Synthetic oligonucleotide
ttgaaatctttctttcctaa

SEQ ID NO: 980 - DNA, 20 bp, Artificial sequence
  Synthetic oligonucleotide
tgtcaatttctatcccccat

SEQ ID NO: 981 - DNA, 20 bp, Artificial sequence
  Synthetic oligonucleotide
tgtatttcaccaatactcaa

SEQ ID NO: 982 - DNA, 20 bp, Artificial sequence
  Synthetic oligonucleotide
tcaatactttccccaagttc

SEQ ID NO: 983 - DNA, 20 bp, Artificial sequence
  Synthetic oligonucleotide
actgtaatcaatcttagctg

SEQ ID NO: 984 - DNA, 20 bp, Artificial sequence
  Synthetic oligonucleotide
tggatttcaaaacaacacct

SEQ ID NO: 985 - DNA, 20 bp, Artificial sequence
  Synthetic oligonucleotide
aggaaaccaaacacctatgc

SEQ ID NO: 986 - DNA, 20 bp, Artificial sequence
  Synthetic oligonucleotide
gatcatttctaaacagacat

SEQ ID NO: 987 - DNA, 20 bp, Artificial sequence
  Synthetic oligonucleotide
gcaaaggaaatttcttgata

SEQ ID NO: 988 - DNA, 20 bp, Artificial sequence
  Synthetic oligonucleotide
gccaggaacatcaattctga

SEQ ID NO: 989 - DNA, 20 bp, Artificial sequence
  Synthetic oligonucleotide
tgcttcatgtattttagctc

SEQ ID NO: 990 - DNA, 20 bp, Artificial sequence
  Synthetic oligonucleotide
acaccctttttactcaacaa

SEQ ID NO: 991 - DNA, 20 bp, Artificial sequence
  Synthetic oligonucleotide
ccaacacaccagcacaggca

SEQ ID NO: 992 - DNA, 20 bp, Artificial sequence
  Synthetic oligonucleotide
acaaagtttataccttaact

SEQ ID NO: 993 - DNA, 20 bp, Artificial sequence
  Synthetic oligonucleotide
gttcaagttcttaaccgact

SEQ ID NO: 994 - DNA, 20 bp, Artificial sequence
  Synthetic oligonucleotide
aagcattgaactccaaccac

SEQ ID NO: 995 - DNA, 20 bp, Artificial sequence
  Synthetic oligonucleotide
gttgaatccaaaatatgaat

SEQ ID NO: 996 - DNA, 20 bp, Artificial sequence
  Synthetic oligonucleotide
cttcaagtaaaaccttttcc

SEQ ID NO: 997 - DNA, 20 bp, Artificial sequence
  Synthetic oligonucleotide
actaattgcctttttctccc

SEQ ID NO: 998 - DNA, 20 bp, Artificial sequence
  Synthetic oligonucleotide
ccatttttcaaatcaaggac

SEQ ID NO: 999 - DNA, 20 bp, Artificial sequence
  Synthetic oligonucleotide
ggaacactttccttctgcac

SEQ ID NO: 1000 - DNA, 20 bp, Artificial sequence
  Synthetic oligonucleotide
cttccatttaaattgtgtaa

SEQ ID NO: 1001 - DNA, 20 bp, Artificial sequence
  Synthetic oligonucleotide
cctttggtttatttctttta

SEQ ID NO: 1002 - DNA, 20 bp, Artificial sequence
  Synthetic oligonucleotide
ttcgatctccactctactca

SEQ ID NO: 1003 - DNA, 20 bp, Artificial sequence
  Synthetic oligonucleotide
cacaagatatttataatctt

SEQ ID NO: 1004 - DNA, 20 bp, Artificial sequence
  Synthetic oligonucleotide
gccaaaatcccctcccggtt

SEQ ID NO: 1005 - DNA, 20 bp, Artificial sequence
  Synthetic oligonucleotide
ctgaggcaacaatcatacct

SEQ ID NO: 1006 - DNA, 20 bp, Artificial sequence
  Synthetic oligonucleotide
tcaccttgttttcttgatca

SEQ ID NO: 1007 - DNA, 20 bp, Artificial sequence
  Synthetic oligonucleotide
agacatcacccattaactct

SEQ ID NO: 1008 - DNA, 20 bp, Artificial sequence
  Synthetic oligonucleotide
cagtcatacattgatttcaa

SEQ ID NO: 1009 - DNA, 20 bp, Artificial sequence
  Synthetic oligonucleotide
atcaagctctttctttcctt

SEQ ID NO: 1010 - DNA, 20 bp, Artificial sequence
  Synthetic oligonucleotide
cgagcattaatttctgagaa

SEQ ID NO: 1011 - DNA, 20 bp, Artificial sequence
  Synthetic oligonucleotide
accacattcccagtgactca

SEQ ID NO: 1012 - DNA, 20 bp, Artificial sequence
  Synthetic oligonucleotide
tacatggaattaacacagca

SEQ ID NO: 1013 - DNA, 20 bp, Artificial sequence
  Synthetic oligonucleotide
aaacttacgacataatcaca

SEQ ID NO: 1014 - DNA, 20 bp, Artificial sequence
  Synthetic oligonucleotide
aaacagacatatccagagct

SEQ ID NO: 1015 - DNA, 20 bp, Artificial sequence
  Synthetic oligonucleotide
cccaagttcaatttactttc

SEQ ID NO: 1016 - DNA, 20 bp, Artificial sequence
  Synthetic oligonucleotide
catacattcctcttacctga

SEQ ID NO: 1017 - DNA, 20 bp, Artificial sequence
  Synthetic oligonucleotide
ggttatctcctaaattgcaa

SEQ ID NO: 1018 - DNA, 20 bp, Artificial sequence
  Synthetic oligonucleotide
gcctcactttcaccttcttg

SEQ ID NO: 1019 - DNA, 20 bp, Artificial sequence
  Synthetic oligonucleotide
cagctgtttatcaacacgca

SEQ ID NO: 1020 - DNA, 20 bp, Artificial sequence
  Synthetic oligonucleotide
cggcaaatttctccacagca

SEQ ID NO: 1021 - DNA, 20 bp, Artificial sequence
  Synthetic oligonucleotide
tcatcttgattcataatcct

SEQ ID NO: 1022 - DNA, 20 bp, Artificial sequence
  Synthetic oligonucleotide
gacatcacccattaactcta

SEQ ID NO: 1023 - DNA, 20 bp, Artificial sequence
  Synthetic oligonucleotide
gacaaacttttttagctgca

SEQ ID NO: 1024 - DNA, 20 bp, Artificial sequence
  Synthetic oligonucleotide
gaattatttattccaaggga

SEQ ID NO: 1025 - DNA, 20 bp, Artificial sequence
  Synthetic oligonucleotide
ggaacatcaattctgagctt

SEQ ID NO: 1026 - DNA, 20 bp, Artificial sequence
  Synthetic oligonucleotide
ttgttgataatatatgcata

SEQ ID NO: 1027 - DNA, 20 bp, Artificial sequence
  Synthetic oligonucleotide
tcacatgtaccatctgatcc

SEQ ID NO: 1028 - DNA, 20 bp, Artificial sequence
  Synthetic oligonucleotide
gcaatcccaatttaacacag

SEQ ID NO: 1029 - DNA, 20 bp, Artificial sequence
  Synthetic oligonucleotide
aggaaatttcttgataccca

SEQ ID NO: 1030 - DNA, 20 bp, Artificial sequence
  Synthetic oligonucleotide
cactccaattttcaaggcca

SEQ ID NO: 1031 - DNA, 20 bp, Artificial sequence
  Synthetic oligonucleotide
aggaaagttttcaatttctt

SEQ ID NO: 1032 - DNA, 20 bp, Artificial sequence
  Synthetic oligonucleotide
cggtgcataaacatttcagc

SEQ ID NO: 1033 - DNA, 20 bp, Artificial sequence
  Synthetic oligonucleotide
tcttaaattttcaatcccct

SEQ ID NO: 1034 - DNA, 20 bp, Artificial sequence
  Synthetic oligonucleotide
ctgtaatcaatcttagctgt

SEQ ID NO: 1035 - DNA, 20 bp, Artificial sequence
  Synthetic oligonucleotide
gccaccactaacctactcta

SEQ ID NO: 1036 - DNA, 20 bp, Artificial sequence
  Synthetic oligonucleotide
aagcagtatttacattatga

SEQ ID NO: 1037 - DNA, 20 bp, Artificial sequence
  Synthetic oligonucleotide
aagtttataccttaacttct

SEQ ID NO: 1038 - DNA, 20 bp, Artificial sequence
  Synthetic oligonucleotide
gcttttgtttctcaatccgt

SEQ ID NO: 1039 - DNA, 20 bp, Artificial sequence
  Synthetic oligonucleotide
gtataacttttcattagcga

SEQ ID NO: 1040 - DNA, 20 bp, Artificial sequence
  Synthetic oligonucleotide
gtttcattaaaatctttccc

SEQ ID NO: 1041 - DNA, 20 bp, Artificial sequence
  Synthetic oligonucleotide
ccctcatacattttacaggc

SEQ ID NO: 1042 - DNA, 20 bp, Artificial sequence
  Synthetic oligonucleotide
caacaaacatcatcatctaa

SEQ ID NO: 1043 - DNA, 20 bp, Artificial sequence
  Synthetic oligonucleotide
cactgcaccaacatatgtgc

SEQ ID NO: 1044 - DNA, 20 bp, Artificial sequence
  Synthetic oligonucleotide
agactcttccactcatatgc

SEQ ID NO: 1045 - DNA, 20 bp, Artificial sequence
  Synthetic oligonucleotide
agcattgaactccaaccacc

SEQ ID NO: 1046 - DNA, 20 bp, Artificial sequence
  Synthetic oligonucleotide
tctgctacttactcactccc

SEQ ID NO: 1047 - DNA, 20 bp, Artificial sequence
  Synthetic oligonucleotide
aaaacaggcatttaatgcta

SEQ ID NO: 1048 - DNA, 20 bp, Artificial sequence
  Synthetic oligonucleotide
agtggcacatctacacatcc

SEQ ID NO: 1049 - DNA, 20 bp, Artificial sequence
  Synthetic oligonucleotide
gctctttctttcctttattt

SEQ ID NO: 1050 - DNA, 20 bp, Artificial sequence
  Synthetic oligonucleotide
gcaatagttgcaatgagcca

SEQ ID NO: 1051 - DNA, 20 bp, Artificial sequence
  Synthetic oligonucleotide
tctccactctactcagatta

SEQ ID NO: 1052 - DNA, 20 bp, Artificial sequence
  Synthetic oligonucleotide
gcaatcctccagcctcctca

SEQ ID NO: 1053 - DNA, 20 bp, Artificial sequence
  Synthetic oligonucleotide
acaaatttatcaacactgct

SEQ ID NO: 1054 - DNA, 20 bp, Artificial sequence
  Synthetic oligonucleotide
ctctaattcctttagaacac

SEQ ID NO: 1055 - DNA, 20 bp, Artificial sequence
  Synthetic oligonucleotide
ggtcatttccgcacaagcaa

SEQ ID NO: 1056 - DNA, 20 bp, Artificial sequence
  Synthetic oligonucleotide
ggagaactcacatttcatga

SEQ ID NO: 1057 - DNA, 20 bp, Artificial sequence
  Synthetic oligonucleotide
attcttttcacagaagcaca

SEQ ID NO: 1058 - DNA, 20 bp, Artificial sequence
  Synthetic oligonucleotide
gtgacaacttcataatgcaa

SEQ ID NO: 1059 - DNA, 20 bp, Artificial sequence
  Synthetic oligonucleotide
tacaaccaaaaccaccctca

SEQ ID NO: 1060 - DNA, 20 bp, Artificial sequence
  Synthetic oligonucleotide
agttcttaaccgactactcc

SEQ ID NO: 1061 - DNA, 20 bp, Artificial sequence
  Synthetic oligonucleotide
gagcattaatttctgagaac

SEQ ID NO: 1062 - DNA, 20 bp, Artificial sequence
  Synthetic oligonucleotide
ccaggtattattccagactt

SEQ ID NO: 1063 - DNA, 20 bp, Artificial sequence
  Synthetic oligonucleotide
tgtacatcagtcattagttt

SEQ ID NO: 1064 - DNA, 20 bp, Artificial sequence
  Synthetic oligonucleotide
ttccctttaattacagttgc

SEQ ID NO: 1065 - DNA, 20 bp, Artificial sequence
  Synthetic oligonucleotide
gctatcttttactctaagat

SEQ ID NO: 1066 - DNA, 20 bp, Artificial sequence
  Synthetic oligonucleotide
ggaatccgattcaccagctc

SEQ ID NO: 1067 - DNA, 20 bp, Artificial sequence
  Synthetic oligonucleotide
cactagctccttccacaggc

SEQ ID NO: 1068 - DNA, 20 bp, Artificial sequence
  Synthetic oligonucleotide
tgaggcaacaatcatacctt

SEQ ID NO: 1069 - DNA, 20 bp, Artificial sequence
  Synthetic oligonucleotide
atcttggtgattatctgcca

SEQ ID NO: 1070 - DNA, 20 bp, Artificial sequence
  Synthetic oligonucleotide
ccaatactcaatcaatttca

SEQ ID NO: 1071 - DNA, 20 bp, Artificial sequence
  Synthetic oligonucleotide
tctttgtttataatcctgtt

SEQ ID NO: 1072 - DNA, 20 bp, Artificial sequence
  Synthetic oligonucleotide
acatggaattaacacagcaa

SEQ ID NO: 1073 - DNA, 20 bp, Artificial sequence
  Synthetic oligonucleotide
catcatgctccaactgtcta

SEQ ID NO: 1074 - DNA, 20 bp, Artificial sequence
  Synthetic oligonucleotide
cacaggttatttcactctac

SEQ ID NO: 1075 - DNA, 20 bp, Artificial sequence
  Synthetic oligonucleotide
ggaccttacttcttactaca

SEQ ID NO: 1076 - DNA, 20 bp, Artificial sequence
  Synthetic oligonucleotide
ctcaaaccaatttcacattc

SEQ ID NO: 1077 - DNA, 20 bp, Artificial sequence
  Synthetic oligonucleotide
gtaaaaccttttcccaagtc

SEQ ID NO: 1078 - DNA, 20 bp, Artificial sequence
  Synthetic oligonucleotide
tagtttgtatatctcaagcc

SEQ ID NO: 1079 - DNA, 20 bp, Artificial sequence
  Synthetic oligonucleotide
tcatttctagaataactctc

SEQ ID NO: 1080 - DNA, 20 bp, Artificial sequence
  Synthetic oligonucleotide
acaagttcaaaaatacctct

SEQ ID NO: 1081 - DNA, 20 bp, Artificial sequence
  Synthetic oligonucleotide
gtagcagctaacatctaagc

SEQ ID NO: 1082 - DNA, 20 bp, Artificial sequence
  Synthetic oligonucleotide
cagcaacttcacaaacattg

SEQ ID NO: 1083 - DNA, 20 bp, Artificial sequence
  Synthetic oligonucleotide
tggatgggaattcaataaac

SEQ ID NO: 1084 - DNA, 20 bp, Artificial sequence
  Synthetic oligonucleotide
ctttggtttatttcttttaa

SEQ ID NO: 1085 - DNA, 20 bp, Artificial sequence
  Synthetic oligonucleotide
ctggaagcagacatttgcaa

SEQ ID NO: 1086 - DNA, 20 bp, Artificial sequence
  Synthetic oligonucleotide
acaaatctatatcctttata

SEQ ID NO: 1087 - DNA, 20 bp, Artificial sequence
  Synthetic oligonucleotide
gaacactttccttctgcact

SEQ ID NO: 1088 - DNA, 20 bp, Artificial sequence
  Synthetic oligonucleotide
acttcttaccactttgagga

SEQ ID NO: 1089 - DNA, 20 bp, Artificial sequence
  Synthetic oligonucleotide
cccacagcccatctgcacaa

SEQ ID NO: 1090 - DNA, 20 bp, Artificial sequence
  Synthetic oligonucleotide
gcaaagtcaaattatagaca

SEQ ID NO: 1091 - DNA, 20 bp, Artificial sequence
  Synthetic oligonucleotide
ctttctttcctttatttgcc

SEQ ID NO: 1092 - DNA, 20 bp, Artificial sequence
  Synthetic oligonucleotide
tttcttttaaacactcatca

SEQ ID NO: 1093 - DNA, 20 bp, Artificial sequence
  Synthetic oligonucleotide
ggcacatctacacatccgtc

SEQ ID NO: 1094 - DNA, 20 bp, Artificial sequence
  Synthetic oligonucleotide
acaattatacatttatgcta

SEQ ID NO: 1095 - DNA, 20 bp, Artificial sequence
  Synthetic oligonucleotide
ccctttaattacagttgcca

SEQ ID NO: 1096 - DNA, 20 bp, Artificial sequence
  Synthetic oligonucleotide
ggcaaatttctccacagcat

SEQ ID NO: 1097 - DNA, 20 bp, Artificial sequence
  Synthetic oligonucleotide
gcaattagtcctcacacata

SEQ ID NO: 1098 - DNA, 20 bp, Artificial sequence
  Synthetic oligonucleotide
gcagtatttacattatgact

SEQ ID NO: 1099 - DNA, 20 bp, Artificial sequence
  Synthetic oligonucleotide
gtcattagtttctaatatct

SEQ ID NO: 1100 - DNA, 20 bp, Artificial sequence
  Synthetic oligonucleotide
acaaggtactctaaagactg

SEQ ID NO: 1101 - DNA, 20 bp, Artificial sequence
  Synthetic oligonucleotide
actgcaccaacatatgtgcc

SEQ ID NO: 1102 - DNA, 20 bp, Artificial sequence
  Synthetic oligonucleotide
cctcatacattttacaggcc

SEQ ID NO: 1103 - DNA, 20 bp, Artificial sequence
  Synthetic oligonucleotide
acaaacttttttagctgcaa

SEQ ID NO: 1104 - DNA, 20 bp, Artificial sequence
  Synthetic oligonucleotide
acagacatatccagagctca

SEQ ID NO: 1105 - DNA, 20 bp, Artificial sequence
  Synthetic oligonucleotide
gacaccaccacctctttttg

SEQ ID NO: 1106 - DNA, 20 bp, Artificial sequence
  Synthetic oligonucleotide
agcaccttcaaatctttctg

SEQ ID NO: 1107 - DNA, 20 bp, Artificial sequence
  Synthetic oligonucleotide
agaagaatttctacacactt

SEQ ID NO: 1108 - DNA, 20 bp, Artificial sequence
  Synthetic oligonucleotide
gcatatgccttccctctgcc

SEQ ID NO: 1109 - DNA, 20 bp, Artificial sequence
  Synthetic oligonucleotide
aagttcaaaaatacctctac

SEQ ID NO: 1110 - DNA, 20 bp, Artificial sequence
  Synthetic oligonucleotide
ggaaagttttcaatttctta

SEQ ID NO: 1111 - DNA, 20 bp, Artificial sequence
  Synthetic oligonucleotide
gccatgtacatgaaactgac

SEQ ID NO: 1112 - DNA, 20 bp, Artificial sequence
  Synthetic oligonucleotide
acttacgacataatcacaga

SEQ ID NO: 1113 - DNA, 20 bp, Artificial sequence
  Synthetic oligonucleotide
caggcatttaatgctagaaa

SEQ ID NO: 1114 - DNA, 20 bp, Artificial sequence
  Synthetic oligonucleotide
gtatggtatttcatatgttt

SEQ ID NO: 1115 - DNA, 20 bp, Artificial sequence
  Synthetic oligonucleotide
catcttgattcataatccta

SEQ ID NO: 1116 - DNA, 20 bp, Artificial sequence
  Synthetic oligonucleotide
gggttccttatttaagctcc

SEQ ID NO: 1117 - DNA, 20 bp, Artificial sequence
  Synthetic oligonucleotide
accaccctcatataatccag

SEQ ID NO: 1118 - DNA, 20 bp, Artificial sequence
  Synthetic oligonucleotide
ccaaggctctaccaaggctc

SEQ ID NO: 1119 - DNA, 20 bp, Artificial sequence
  Synthetic oligonucleotide
aaccgactactccaagcctt

SEQ ID NO: 1120 - DNA, 20 bp, Artificial sequence
  Synthetic oligonucleotide
ccagaattcccgatatccac

SEQ ID NO: 1121 - DNA, 20 bp, Artificial sequence
  Synthetic oligonucleotide
ttctgccttttttcactcaa

SEQ ID NO: 1122 - DNA, 20 bp, Artificial sequence
  Synthetic oligonucleotide
gcaatcctcccaccacaccg

SEQ ID NO: 1123 - DNA, 20 bp, Artificial sequence
  Synthetic oligonucleotide
atctatatcctttatatcct

SEQ ID NO: 1124 - DNA, 20 bp, Artificial sequence
  Synthetic oligonucleotide
gttaacatcactaaagccaa

SEQ ID NO: 1125 - DNA, 20 bp, Artificial sequence
  Synthetic oligonucleotide
gcaccattctaaaaccatct

SEQ ID NO: 1126 - DNA, 20 bp, Artificial sequence
  Synthetic oligonucleotide
tcccaatttaacacagtttc

SEQ ID NO: 1127 - DNA, 20 bp, Artificial sequence
  Synthetic oligonucleotide
ggtgaagtcatttttactaa

SEQ ID NO: 1128 - DNA, 20 bp, Artificial sequence
  Synthetic oligonucleotide
gttacagcttatctaaagtc

SEQ ID NO: 1129 - DNA, 20 bp, Artificial sequence
  Synthetic oligonucleotide
tcaaaccaatttcacattca

SEQ ID NO: 1130 - DNA, 20 bp, Artificial sequence
  Synthetic oligonucleotide
tactactgaatttcattgat

SEQ ID NO: 1131 - DNA, 20 bp, Artificial sequence
  Synthetic oligonucleotide
aacttcacaaacattgatca

SEQ ID NO: 1132 - DNA, 20 bp, Artificial sequence
  Synthetic oligonucleotide
gcttctaccctacatatccc

SEQ ID NO: 1133 - DNA, 20 bp, Artificial sequence
  Synthetic oligonucleotide
cttttgtttctcaatccgtt

SEQ ID NO: 1134 - DNA, 20 bp, Artificial sequence
  Synthetic oligonucleotide
aacacattcccattagggtt

SEQ ID NO: 1135 - DNA, 20 bp, Artificial sequence
  Synthetic oligonucleotide
tgggaattcaataaactgca

SEQ ID NO: 1136 - DNA, 20 bp, Artificial sequence
  Synthetic oligonucleotide
tcaaagggcttatacatcct

SEQ ID NO: 1137 - DNA, 20 bp, Artificial sequence
  Synthetic oligonucleotide
ggtattcttccatatgggct

SEQ ID NO: 1138 - DNA, 20 bp, Artificial sequence
  Synthetic oligonucleotide
tcttgatacccatattttga

SEQ ID NO: 1139 - DNA, 20 bp, Artificial sequence
  Synthetic oligonucleotide
gaactcataaatatcaaccc

SEQ ID NO: 1140 - DNA, 20 bp, Artificial sequence
  Synthetic oligonucleotide
tctgcactaaattttcctaa

SEQ ID NO: 1141 - DNA, 20 bp, Artificial sequence
  Synthetic oligonucleotide
cttaaattttcaatcccctt

SEQ ID NO: 1142 - DNA, 20 bp, Artificial sequence
  Synthetic oligonucleotide
cagtggtttgaataaagcca

SEQ ID NO: 1143 - DNA, 20 bp, Artificial sequence
  Synthetic oligonucleotide
gaagttgctatcatttgcag

SEQ ID NO: 1144 - DNA, 20 bp, Artificial sequence
  Synthetic oligonucleotide
cacagaagcacaatttctta

SEQ ID NO: 1145 - DNA, 20 bp, Artificial sequence
  Synthetic oligonucleotide
tagcagctaacatctaagcc

SEQ ID NO: 1146 - DNA, 20 bp, Artificial sequence
  Synthetic oligonucleotide
ctatcttttactctaagata

SEQ ID NO: 1147 - DNA, 20 bp, Artificial sequence
  Synthetic oligonucleotide
aaggcaactatttcacgcat

SEQ ID NO: 1148 - DNA, 20 bp, Artificial sequence
  Synthetic oligonucleotide
gtgcataaacatttcagctt

SEQ ID NO: 1149 - DNA, 20 bp, Artificial sequence
  Synthetic oligonucleotide
gaggcaacaatcatacctta

SEQ ID NO: 1150 - DNA, 20 bp, Artificial sequence
  Synthetic oligonucleotide
atcttgtaaaaataactccc

SEQ ID NO: 1151 - DNA, 20 bp, Artificial sequence
  Synthetic oligonucleotide
agtttataccttaacttctc

SEQ ID NO: 1152 - DNA, 20 bp, Artificial sequence
  Synthetic oligonucleotide
ggagagtttttacaaatcat

SEQ ID NO: 1153 - DNA, 20 bp, Artificial sequence
  Synthetic oligonucleotide
cccaaatttatacactgaaa

SEQ ID NO: 1154 - DNA, 20 bp, Artificial sequence
  Synthetic oligonucleotide
atggaattaacacagcaact

SEQ ID NO: 1155 - DNA, 20 bp, Artificial sequence
  Synthetic oligonucleotide
aggttatttcactctacact

SEQ ID NO: 1156 - DNA, 20 bp, Artificial sequence
  Synthetic oligonucleotide
caccactaacctactctact

SEQ ID NO: 1157 - DNA, 20 bp, Artificial sequence
  Synthetic oligonucleotide
aagttcaatttactttcaat

SEQ ID NO: 1158 - DNA, 20 bp, Artificial sequence
  Synthetic oligonucleotide
agctaggtatttccctctta

SEQ ID NO: 1159 - DNA, 20 bp, Artificial sequence
  Synthetic oligonucleotide
gaccagctaatctcttacct

SEQ ID NO: 1160 - DNA, 20 bp, Artificial sequence
  Synthetic oligonucleotide
aacatcatcatctaaactta

SEQ ID NO: 1161 - DNA, 20 bp, Artificial sequence
  Synthetic oligonucleotide
acatcacccattaactctac

SEQ ID NO: 1162 - DNA, 20 bp, Artificial sequence
  Synthetic oligonucleotide
ccagatttataaacattcta

SEQ ID NO: 1163 - DNA, 20 bp, Artificial sequence
  Synthetic oligonucleotide
agcattttacaaacactacc

SEQ ID NO: 1164 - DNA, 20 bp, Artificial sequence
  Synthetic oligonucleotide
ctccaccttacctaagagca

SEQ ID NO: 1165 - DNA, 20 bp, Artificial sequence
  Synthetic oligonucleotide
gaccttacttcttactacaa

SEQ ID NO: 1166 - DNA, 20 bp, Artificial sequence
  Synthetic oligonucleotide
gggtatttccactcattatt

SEQ ID NO: 1167 - DNA, 20 bp, Artificial sequence
  Synthetic oligonucleotide
tctttcctttatttgcctct

SEQ ID NO: 1168 - DNA, 20 bp, Artificial sequence
  Synthetic oligonucleotide
tgctagaaatttccatttac

SEQ ID NO: 1169 - DNA, 20 bp, Artificial sequence
  Synthetic oligonucleotide
cagtatttacattatgacta

SEQ ID NO: 1170 - DNA, 20 bp, Artificial sequence
  Synthetic oligonucleotide
tacacacttccatcagtgct

SEQ ID NO: 1171 - DNA, 20 bp, Artificial sequence
  Synthetic oligonucleotide
ggttatttcactctacactg

SEQ ID NO: 1172 - DNA, 20 bp, Artificial sequence
  Synthetic oligonucleotide
gcaaaatctctgaataggca

SEQ ID NO: 1173 - DNA, 20 bp, Artificial sequence
  Synthetic oligonucleotide
gcaactatttcacgcatgcc

SEQ ID NO: 1174 - DNA, 20 bp, Artificial sequence
  Synthetic oligonucleotide
gcatgataattatattctcc

SEQ ID NO: 1175 - DNA, 20 bp, Artificial sequence
  Synthetic oligonucleotide
agtgccacttttcaacacat

SEQ ID NO: 1176 - DNA, 20 bp, Artificial sequence
  Synthetic oligonucleotide
agaagcacaatttcttagca

SEQ ID NO: 1177 - DNA, 20 bp, Artificial sequence
  Synthetic oligonucleotide
gcactaaattttcctaatta

SEQ ID NO: 1178 - DNA, 20 bp, Artificial sequence
  Synthetic oligonucleotide
tagacaatttttaagcaaac

SEQ ID NO: 1179 - DNA, 20 bp, Artificial sequence
  Synthetic oligonucleotide
gtattcttccatatgggctc

SEQ ID NO: 1180 - DNA, 20 bp, Artificial sequence
  Synthetic oligonucleotide
acactcatcatctaagcatt

SEQ ID NO: 1181 - DNA, 20 bp, Artificial sequence
  Synthetic oligonucleotide
gggtaatttcctcaaaggca

SEQ ID NO: 1182 - DNA, 20 bp, Artificial sequence
  Synthetic oligonucleotide
gtatttaacactccaagggc

SEQ ID NO: 1183 - DNA, 20 bp, Artificial sequence
  Synthetic oligonucleotide
taccaaggctctaccaaggc

SEQ ID NO: 1184 - DNA, 20 bp, Artificial sequence
  Synthetic oligonucleotide
tgattattcctcaattggtc

SEQ ID NO: 1185 - DNA, 20 bp, Artificial sequence
  Synthetic oligonucleotide
ggacattacctttattgcgg

SEQ ID NO: 1186 - DNA, 20 bp, Artificial sequence
  Synthetic oligonucleotide
ccattctaaaaccatctgta

SEQ ID NO: 1187 - DNA, 20 bp, Artificial sequence
  Synthetic oligonucleotide
agtcatttttactaatgagc

SEQ ID NO: 1188 - DNA, 20 bp, Artificial sequence
  Synthetic oligonucleotide
actcataaatatcaacccct

SEQ ID NO: 1189 - DNA, 20 bp, Artificial sequence
  Synthetic oligonucleotide
acactgaaacttaattacca

SEQ ID NO: 1190 - DNA, 20 bp, Artificial sequence
  Synthetic oligonucleotide
tcattagtttctaatatctt

SEQ ID NO: 1191 - DNA, 20 bp, Artificial sequence
  Synthetic oligonucleotide
cagtgcttaaattattagca

SEQ ID NO: 1192 - DNA, 20 bp, Artificial sequence
  Synthetic oligonucleotide
ttgaactatattccactcaa

SEQ ID NO: 1193 - DNA, 20 bp, Artificial sequence
  Synthetic oligonucleotide
gggcatgattccacatcaca

SEQ ID NO: 1194 - DNA, 20 bp, Artificial sequence
  Synthetic oligonucleotide
ataaacatttcagcttgcta

SEQ ID NO: 1195 - DNA, 20 bp, Artificial sequence
  Synthetic oligonucleotide
ccagctaatctcttacctca

SEQ ID NO: 1196 - DNA, 20 bp, Artificial sequence
  Synthetic oligonucleotide
cttacgacataatcacagaa

SEQ ID NO: 1197 - DNA, 20 bp, Artificial sequence
  Synthetic oligonucleotide
tcactcaatattacaatcca

SEQ ID NO: 1198 - DNA, 20 bp, Artificial sequence
  Synthetic oligonucleotide
ggtatttccactcattattt

SEQ ID NO: 1199 - DNA, 20 bp, Artificial sequence
  Synthetic oligonucleotide
acatcatcatctaaacttaa

SEQ ID NO: 1200 - DNA, 20 bp, Artificial sequence
  Synthetic oligonucleotide
tctatatcctttatatcctg

SEQ ID NO: 1201 - DNA, 20 bp, Artificial sequence
  Synthetic oligonucleotide
gcactcaaatttaaactgta

SEQ ID NO: 1202 - DNA, 20 bp, Artificial sequence
  Synthetic oligonucleotide
agcttcttaaacatactatt

SEQ ID NO: 1203 - DNA, 20 bp, Artificial sequence
  Synthetic oligonucleotide
tcattgtatctatcacgcaa

SEQ ID NO: 1204 - DNA, 20 bp, Artificial sequence
  Synthetic oligonucleotide
tccagcaaaatcatcaggca

SEQ ID NO: 1205 - DNA, 20 bp, Artificial sequence
  Synthetic oligonucleotide
agagatagaattcaaacctt

SEQ ID NO: 1206 - DNA, 20 bp, Artificial sequence
  Synthetic oligonucleotide
gttctgtcaaatcagcataa

SEQ ID NO: 1207 - DNA, 20 bp, Artificial sequence
  Synthetic oligonucleotide
tccactgtaaatatacacca

SEQ ID NO: 1208 - DNA, 20 bp, Artificial sequence
  Synthetic oligonucleotide
gcatcttgttttaccaccca

SEQ ID NO: 1209 - DNA, 20 bp, Artificial sequence
  Synthetic oligonucleotide
gcaccttcaaatctttctgt

SEQ ID NO: 1210 - DNA, 20 bp, Artificial sequence
  Synthetic oligonucleotide
gccaaactgcatcttacaac

SEQ ID NO: 1211 - DNA, 20 bp, Artificial sequence
  Synthetic oligonucleotide
acaaccatatttttaactca

SEQ ID NO: 1212 - DNA, 20 bp, Artificial sequence
  Synthetic oligonucleotide
gagtttttacaaatcatcta

SEQ ID NO: 1213 - DNA, 20 bp, Artificial sequence
  Synthetic oligonucleotide
ggagcaatatataaagacat

SEQ ID NO: 1214 - DNA, 20 bp, Artificial sequence
  Synthetic oligonucleotide
ccaccctcatataatccagt

SEQ ID NO: 1215 - DNA, 20 bp, Artificial sequence
  Synthetic oligonucleotide
aacacaggtcttcctcccaa

SEQ ID NO: 1216 - DNA, 20 bp, Artificial sequence
  Synthetic oligonucleotide
ggcttatacatcctacaaat

SEQ ID NO: 1217 - DNA, 20 bp, Artificial sequence
  Synthetic oligonucleotide
tcacacatacacaatttaat

SEQ ID NO: 1218 - DNA, 20 bp, Artificial sequence
  Synthetic oligonucleotide
cagcatgtcccaaatcctgc

SEQ ID NO: 1219 - DNA, 20 bp, Artificial sequence
  Synthetic oligonucleotide
tcacccattaactctaccgt

SEQ ID NO: 1220 - DNA, 20 bp, Artificial sequence
  Synthetic oligonucleotide
cctactctactaccccatct

SEQ ID NO: 1221 - DNA, 20 bp, Artificial sequence
  Synthetic oligonucleotide
tttttaattttctaatggga

SEQ ID NO: 1222 - DNA, 20 bp, Artificial sequence
  Synthetic oligonucleotide
gctacatttttttaaaagtt

SEQ ID NO: 1223 - DNA, 20 bp, Artificial sequence
  Synthetic oligonucleotide
cttgaagtaatcccaagaat

SEQ ID NO: 1224 - DNA, 20 bp, Artificial sequence
  Synthetic oligonucleotide
gcaaatttctccacagcatc

SEQ ID NO: 1225 - DNA, 20 bp, Artificial sequence
  Synthetic oligonucleotide
gtttataccttaacttctcc

SEQ ID NO: 1226 - DNA, 20 bp, Artificial sequence
  Synthetic oligonucleotide
ggtgagtaaatctaccttta

SEQ ID NO: 1227 - DNA, 20 bp, Artificial sequence
  Synthetic oligonucleotide
aaagcactcatcagtgccct

SEQ ID NO: 1228 - DNA, 20 bp, Artificial sequence
  Synthetic oligonucleotide
ccttacttcttactacaaat

SEQ ID NO: 1229 - DNA, 20 bp, Artificial sequence
  Synthetic oligonucleotide
gttcaaaaatacctctacta

SEQ ID NO: 1230 - DNA, 20 bp, Artificial sequence
  Synthetic oligonucleotide
gtcacacctaaatcctagcc

SEQ ID NO: 1231 - DNA, 20 bp, Artificial sequence
  Synthetic oligonucleotide
gctttgatcacaaaagcacc

SEQ ID NO: 1232 - DNA, 20 bp, Artificial sequence
  Synthetic oligonucleotide
tcaagctcttttcctgcatc

SEQ ID NO: 1233 - DNA, 20 bp, Artificial sequence
  Synthetic oligonucleotide
cacatctacacatccgtcca

SEQ ID NO: 1234 - DNA, 20 bp, Artificial sequence
  Synthetic oligonucleotide
ctgttcacaaatgttagaaa

SEQ ID NO: 1235 - DNA, 20 bp, Artificial sequence
  Synthetic oligonucleotide
aagagcacatttagtagcca

SEQ ID NO: 1236 - DNA, 20 bp, Artificial sequence
  Synthetic oligonucleotide
aagtcttgaaatccaagtta

SEQ ID NO: 1237 - DNA, 20 bp, Artificial sequence
  Synthetic oligonucleotide
ggataacacctctttcagtt

SEQ ID NO: 1238 - DNA, 20 bp, Artificial sequence
  Synthetic oligonucleotide
gcaacaatcataccttaatt

SEQ ID NO: 1239 - DNA, 20 bp, Artificial sequence
  Synthetic oligonucleotide
aaccaatttcacattcacac

SEQ ID NO: 1240 - DNA, 20 bp, Artificial sequence
  Synthetic oligonucleotide
ggctgatgaactcctctcca

SEQ ID NO: 1241 - DNA, 20 bp, Artificial sequence
  Synthetic oligonucleotide
ccacttctaaataaatctca

SEQ ID NO: 1242 - DNA, 20 bp, Artificial sequence
  Synthetic oligonucleotide
agcagctaacatctaagccc

SEQ ID NO: 1243 - DNA, 20 bp, Artificial sequence
  Synthetic oligonucleotide
tcatacattttacaggcctt

SEQ ID NO: 1244 - DNA, 20 bp, Artificial sequence
  Synthetic oligonucleotide
gaccacactaaaactgctgt

SEQ ID NO: 1245 - DNA, 20 bp, Artificial sequence
  Synthetic oligonucleotide
catcttgttttaccacccat

SEQ ID NO: 1246 - DNA, 20 bp, Artificial sequence
  Synthetic oligonucleotide
tacgacataatcacagaaga

SEQ ID NO: 1247 - DNA, 20 bp, Artificial sequence
  Synthetic oligonucleotide
gaagcacaatttcttagcaa

SEQ ID NO: 1248 - DNA, 20 bp, Artificial sequence
  Synthetic oligonucleotide
acatactatttattcaagaa

SEQ ID NO: 1249 - DNA, 20 bp, Artificial sequence
  Synthetic oligonucleotide
caagctcttttcctgcatca

SEQ ID NO: 1250 - DNA, 20 bp, Artificial sequence
  Synthetic oligonucleotide
gaccatgtcaatgaatggca

SEQ ID NO: 1251 - DNA, 20 bp, Artificial sequence
  Synthetic oligonucleotide
tccaagttatatacattaca

SEQ ID NO: 1252 - DNA, 20 bp, Artificial sequence
  Synthetic oligonucleotide
tgaaacttaattaccagggt

SEQ ID NO: 1253 - DNA, 20 bp, Artificial sequence
  Synthetic oligonucleotide
atccagttattcttatgcca

SEQ ID NO: 1254 - DNA, 20 bp, Artificial sequence
  Synthetic oligonucleotide
tagtttctaatatcttgaac

SEQ ID NO: 1255 - DNA, 20 bp, Artificial sequence
  Synthetic oligonucleotide
acaggaggttttattttcct

SEQ ID NO: 1256 - DNA, 20 bp, Artificial sequence
  Synthetic oligonucleotide
cagaaaggtcttccttccca

SEQ ID NO: 1257 - DNA, 20 bp, Artificial sequence
  Synthetic oligonucleotide
tcaaacctttttttttccta

SEQ ID NO: 1258 - DNA, 20 bp, Artificial sequence
  Synthetic oligonucleotide
gcctatagattctatttcta

SEQ ID NO: 1259 - DNA, 20 bp, Artificial sequence
  Synthetic oligonucleotide
aatccagttattagtacctt

SEQ ID NO: 1260 - DNA, 20 bp, Artificial sequence
  Synthetic oligonucleotide
acatacacaatttaatcctc

SEQ ID NO: 1261 - DNA, 20 bp, Artificial sequence
  Synthetic oligonucleotide
tggtcagaaacaactgtcaa

SEQ ID NO: 1262 - DNA, 20 bp, Artificial sequence
  Synthetic oligonucleotide
tcattttttcacatttaggt

SEQ ID NO: 1263 - DNA, 20 bp, Artificial sequence
  Synthetic oligonucleotide
gcaacaatttattctaagct

SEQ ID NO: 1264 - DNA, 20 bp, Artificial sequence
  Synthetic oligonucleotide
acattatgactatctgaatc

SEQ ID NO: 1265 - DNA, 20 bp, Artificial sequence
  Synthetic oligonucleotide
agcaaatcccagtaatacgg

SEQ ID NO: 1266 - DNA, 20 bp, Artificial sequence
  Synthetic oligonucleotide
tgaacgaatccccttcatca

SEQ ID NO: 1267 - DNA, 20 bp, Artificial sequence
  Synthetic oligonucleotide
agcaaacaacagtcttcctt

SEQ ID NO: 1268 - DNA, 20 bp, Artificial sequence
  Synthetic oligonucleotide
accaaggctctaccaaggct

SEQ ID NO: 1269 - DNA, 20 bp, Artificial sequence
  Synthetic oligonucleotide
gcctaaatatatttaccatc

SEQ ID NO: 1270 - DNA, 20 bp, Artificial sequence
  Synthetic oligonucleotide
agggcactgcaccaatatca

SEQ ID NO: 1271 - DNA, 20 bp, Artificial sequence
  Synthetic oligonucleotide
cctttatttgcctcttcccc

SEQ ID NO: 1272 - DNA, 20 bp, Artificial sequence
  Synthetic oligonucleotide
gctgatgaactcctctccat

SEQ ID NO: 1273 - DNA, 20 bp, Artificial sequence
  Synthetic oligonucleotide
acacacttccatcagtgctt

SEQ ID NO: 1274 - DNA, 20 bp, Artificial sequence
  Synthetic oligonucleotide
ttggtcattttcatcagcta

SEQ ID NO: 1275 - DNA, 20 bp, Artificial sequence
  Synthetic oligonucleotide
tcatcatctaaacttaaacc

SEQ ID NO: 1276 - DNA, 20 bp, Artificial sequence
  Synthetic oligonucleotide
acaatcataccttaatttca

SEQ ID NO: 1277 - DNA, 20 bp, Artificial sequence
  Synthetic oligonucleotide
gacaccacaaacatttctac

SEQ ID NO: 1278 - DNA, 20 bp, Artificial sequence
  Synthetic oligonucleotide
actcaatattacaatccaga

SEQ ID NO: 1279 - DNA, 20 bp, Artificial sequence
  Synthetic oligonucleotide
tcatgacttcattctatcct

SEQ ID NO: 1280 - DNA, 20 bp, Artificial sequence
  Synthetic oligonucleotide
gtcatttttactaatgagct

SEQ ID NO: 1281 - DNA, 20 bp, Artificial sequence
  Synthetic oligonucleotide
cccatccctttttaaggcaa

SEQ ID NO: 1282 - DNA, 20 bp, Artificial sequence
  Synthetic oligonucleotide
ctgcattccacaacttccca

SEQ ID NO: 1283 - DNA, 20 bp, Artificial sequence
  Synthetic oligonucleotide
cactatgtactccacagcac

SEQ ID NO: 1284 - DNA, 20 bp, Artificial sequence
  Synthetic oligonucleotide
gtcaaactatatctccaata

SEQ ID NO: 1285 - DNA, 20 bp, Artificial sequence
  Synthetic oligonucleotide
ggcacagacattacctctcc

SEQ ID NO: 1286 - DNA, 20 bp, Artificial sequence
  Synthetic oligonucleotide
ttcaggacccacccttgctc

SEQ ID NO: 1287 - DNA, 20 bp, Artificial sequence
  Synthetic oligonucleotide
acggcacacacctattctcc

SEQ ID NO: 1288 - DNA, 20 bp, Artificial sequence
  Synthetic oligonucleotide
tggaatatacttacaccata

SEQ ID NO: 1289 - DNA, 20 bp, Artificial sequence
  Synthetic oligonucleotide
agttggttccacattttagc

SEQ ID NO: 1290 - DNA, 20 bp, Artificial sequence
  Synthetic oligonucleotide
ccaatttcacattcacacga

SEQ ID NO: 1291 - DNA, 20 bp, Artificial sequence
  Synthetic oligonucleotide
ccaaactgcatcttacaacc

SEQ ID NO: 1292 - DNA, 20 bp, Artificial sequence
  Synthetic oligonucleotide
ccctaaatatttccctatca

SEQ ID NO: 1293 - DNA, 20 bp, Artificial sequence
  Synthetic oligonucleotide
ggcacgcattccatacagaa

SEQ ID NO: 1294 - DNA, 20 bp, Artificial sequence
  Synthetic oligonucleotide
ccaccttgcatctctgcact

SEQ ID NO: 1295 - DNA, 20 bp, Artificial sequence
  Synthetic oligonucleotide
gggacacaattcccagattc

SEQ ID NO: 1296 - DNA, 20 bp, Artificial sequence
  Synthetic oligonucleotide
caagattattttaaatttct

SEQ ID NO: 1297 - DNA, 20 bp, Artificial sequence
  Synthetic oligonucleotide
cacccattaactctaccgta

SEQ ID NO: 1298 - DNA, 20 bp, Artificial sequence
  Synthetic oligonucleotide
ttgctaattttctttgctga

SEQ ID NO: 1299 - DNA, 20 bp, Artificial sequence
  Synthetic oligonucleotide
ctttctgttccatcttcaca

SEQ ID NO: 1300 - DNA, 20 bp, Artificial sequence
  Synthetic oligonucleotide
agggaactcctcaatgccag

SEQ ID NO: 1301 - DNA, 20 bp, Artificial sequence
  Synthetic oligonucleotide
tatcctttatatcctgggtt

SEQ ID NO: 1302 - DNA, 20 bp, Artificial sequence
  Synthetic oligonucleotide
actctactaccccatctcta

SEQ ID NO: 1303 - DNA, 20 bp, Artificial sequence
  Synthetic oligonucleotide
ggtgtctacccatattttct

SEQ ID NO: 1304 - DNA, 20 bp, Artificial sequence
  Synthetic oligonucleotide
gtttttacaaatcatctatc

SEQ ID NO: 1305 - DNA, 20 bp, Artificial sequence
  Synthetic oligonucleotide
gcttatacatcctacaaatc

SEQ ID NO: 1306 - DNA, 20 bp, Artificial sequence
  Synthetic oligonucleotide
gcagctaacatctaagccct

SEQ ID NO: 1307 - DNA, 20 bp, Artificial sequence
  Synthetic oligonucleotide
tgagtggacatctcagatgc

SEQ ID NO: 1308 - DNA, 20 bp, Artificial sequence
  Synthetic oligonucleotide
tgcttaaattattagcatta

SEQ ID NO: 1309 - DNA, 20 bp, Artificial sequence
  Synthetic oligonucleotide
ggcatgattccacatcacaa

SEQ ID NO: 1310 - DNA, 20 bp, Artificial sequence
  Synthetic oligonucleotide
acttcttactacaaatgtcc

SEQ ID NO: 1311 - DNA, 20 bp, Artificial sequence
  Synthetic oligonucleotide
ccaacacaactctaccttca

SEQ ID NO: 1312 - DNA, 20 bp, Artificial sequence
  Synthetic oligonucleotide
aagtttagaaatctattgtt

SEQ ID NO: 1313 - DNA, 20 bp, Artificial sequence
  Synthetic oligonucleotide
ttagaagtttccaattcttg

SEQ ID NO: 1314 - DNA, 20 bp, Artificial sequence
  Synthetic oligonucleotide
gcttgcattgttattagcaa

SEQ ID NO: 1315 - DNA, 20 bp, Artificial sequence
  Synthetic oligonucleotide
catgataattatattctcct

SEQ ID NO: 1316 - DNA, 20 bp, Artificial sequence
  Synthetic oligonucleotide
accacaagatttcattccac

SEQ ID NO: 1317 - DNA, 20 bp, Artificial sequence
  Synthetic oligonucleotide
aggcaagtcatataaaccta

SEQ ID NO: 1318 - DNA, 20 bp, Artificial sequence
  Synthetic oligonucleotide
tgccacttttcaacacatgc

SEQ ID NO: 1319 - DNA, 20 bp, Artificial sequence
  Synthetic oligonucleotide
tcacacctaaatcctagccc

SEQ ID NO: 1320 - DNA, 20 bp, Artificial sequence
  Synthetic oligonucleotide
tggtacctcaaccttcaaca

SEQ ID NO: 1321 - DNA, 20 bp, Artificial sequence
  Synthetic oligonucleotide
actttggttttcttttcagt

SEQ ID NO: 1322 - DNA, 20 bp, Artificial sequence
  Synthetic oligonucleotide
tatgctacactctaacacat

SEQ ID NO: 1323 - DNA, 20 bp, Artificial sequence
  Synthetic oligonucleotide
aaggatggcatctctttcta

SEQ ID NO: 1324 - DNA, 20 bp, Artificial sequence
  Synthetic oligonucleotide
tctattgtttttatatcagt

SEQ ID NO: 1325 - DNA, 20 bp, Artificial sequence
  Synthetic oligonucleotide
caacaatttattctaagctt

SEQ ID NO: 1326 - DNA, 20 bp, Artificial sequence
  Synthetic oligonucleotide
tagcagagttcaacaagtgc

SEQ ID NO: 1327 - DNA, 20 bp, Artificial sequence
  Synthetic oligonucleotide
ggcaagtatcttttaagcaa

SEQ ID NO: 1328 - DNA, 20 bp, Artificial sequence
  Synthetic oligonucleotide
tatttgttcctcttaataca

SEQ ID NO: 1329 - DNA, 20 bp, Artificial sequence
  Synthetic oligonucleotide
gtatgtttacttgaacggat

SEQ ID NO: 1330 - DNA, 20 bp, Artificial sequence
  Synthetic oligonucleotide
ccacttttcaacacatgcac

SEQ ID NO: 1331 - DNA, 20 bp, Artificial sequence
  Synthetic oligonucleotide
tggtcattttcatcagctat

SEQ ID NO: 1332 - DNA, 20 bp, Artificial sequence
  Synthetic oligonucleotide
aacaacagtcttcctttctc

SEQ ID NO: 1333 - DNA, 20 bp, Artificial sequence
  Synthetic oligonucleotide
gttattagtaccttcagtta

SEQ ID NO: 1334 - DNA, 20 bp, Artificial sequence
  Synthetic oligonucleotide
gcatcttacaaccagtggta

SEQ ID NO: 1335 - DNA, 20 bp, Artificial sequence
  Synthetic oligonucleotide
ttgaggcttttcctacagct

SEQ ID NO: 1336 - DNA, 20 bp, Artificial sequence
  Synthetic oligonucleotide
gcttcttttcctcctgctta

SEQ ID NO: 1337 - DNA, 20 bp, Artificial sequence
  Synthetic oligonucleotide
accaatgtgatcattagctt

SEQ ID NO: 1338 - DNA, 20 bp, Artificial sequence
  Synthetic oligonucleotide
gattctagaaatatacactc

SEQ ID NO: 1339 - DNA, 20 bp, Artificial sequence
  Synthetic oligonucleotide
cattttttcacatttaggta

SEQ ID NO: 1340 - DNA, 20 bp, Artificial sequence
  Synthetic oligonucleotide
catacacaatttaatcctca

SEQ ID NO: 1341 - DNA, 20 bp, Artificial sequence
  Synthetic oligonucleotide
acatcaactatccattagac

SEQ ID NO: 1342 - DNA, 20 bp, Artificial sequence
  Synthetic oligonucleotide
caggaggttttattttcctc

SEQ ID NO: 1343 - DNA, 20 bp, Artificial sequence
  Synthetic oligonucleotide
cgtactatttctctattgca

SEQ ID NO: 1344 - DNA, 20 bp, Artificial sequence
  Synthetic oligonucleotide
tagcattatcttcaattcat

SEQ ID NO: 1345 - DNA, 20 bp, Artificial sequence
  Synthetic oligonucleotide
caatcataccttaatttcat

SEQ ID NO: 1346 - DNA, 20 bp, Artificial sequence
  Synthetic oligonucleotide
tcatttttactaatgagctc

SEQ ID NO: 1347 - DNA, 20 bp, Artificial sequence
  Synthetic oligonucleotide
gcactgcaccaatatcatta

SEQ ID NO: 1348 - DNA, 20 bp, Artificial sequence
  Synthetic oligonucleotide
gcttgccttcttccaagcca

SEQ ID NO: 1349 - DNA, 20 bp, Artificial sequence
  Synthetic oligonucleotide
ccatccctttttaaggcaac

SEQ ID NO: 1350 - DNA, 20 bp, Artificial sequence
  Synthetic oligonucleotide
gcagcatcgccctcttcaga

SEQ ID NO: 1351 - DNA, 20 bp, Artificial sequence
  Synthetic oligonucleotide
ccacactaaaactgctgtca

SEQ ID NO: 1352 - DNA, 20 bp, Artificial sequence
  Synthetic oligonucleotide
tctcagtttttcctcttgcc

SEQ ID NO: 1353 - DNA, 20 bp, Artificial sequence
  Synthetic oligonucleotide
atgaaatgaccatctcatcc

SEQ ID NO: 1354 - DNA, 20 bp, Artificial sequence
  Synthetic oligonucleotide
gtaagatgaccatacaacta

SEQ ID NO: 1355 - DNA, 20 bp, Artificial sequence
  Synthetic oligonucleotide
ggaggaattttacctacagc

SEQ ID NO: 1356 - DNA, 20 bp, Artificial sequence
  Synthetic oligonucleotide
tccacaacttcccattctgc

SEQ ID NO: 1357 - DNA, 20 bp, Artificial sequence
  Synthetic oligonucleotide
gtatgagcccatccacagta

SEQ ID NO: 1358 - DNA, 20 bp, Artificial sequence
  Synthetic oligonucleotide
agcatgcttccttctgctca

SEQ ID NO: 1359 - DNA, 20 bp, Artificial sequence
  Synthetic oligonucleotide
ggcacacacctattctccta

SEQ ID NO: 1360 - DNA, 20 bp, Artificial sequence
  Synthetic oligonucleotide
tactatttattcaagaagaa

SEQ ID NO: 1361 - DNA, 20 bp, Artificial sequence
  Synthetic oligonucleotide
tggaataccactacttcata

SEQ ID NO: 1362 - DNA, 20 bp, Artificial sequence
  Synthetic oligonucleotide
ctaccagcaaattattacca

SEQ ID NO: 1363 - DNA, 20 bp, Artificial sequence
  Synthetic oligonucleotide
tgtctcaccctttcactcct

SEQ ID NO: 1364 - DNA, 20 bp, Artificial sequence
  Synthetic oligonucleotide
ggttgtcctaacacaaggac

SEQ ID NO: 1365 - DNA, 20 bp, Artificial sequence
  Synthetic oligonucleotide
aacctttttttttcctactt

SEQ ID NO: 1366 - DNA, 20 bp, Artificial sequence
  Synthetic oligonucleotide
ttgcctcttcccctatttct

SEQ ID NO: 1367 - DNA, 20 bp, Artificial sequence
  Synthetic oligonucleotide
gccaaaagaaacgacagctt

SEQ ID NO: 1368 - DNA, 20 bp, Artificial sequence
  Synthetic oligonucleotide
aacacaactctaccttcatc

SEQ ID NO: 1369 - DNA, 20 bp, Artificial sequence
  Synthetic oligonucleotide
ctgttccatcttcacagggc

SEQ ID NO: 1370 - DNA, 20 bp, Artificial sequence
  Synthetic oligonucleotide
ccatctctaaccccaggcaa

SEQ ID NO: 1371 - DNA, 20 bp, Artificial sequence
  Synthetic oligonucleotide
tgataattatattctccttc

SEQ ID NO: 1372 - DNA, 20 bp, Artificial sequence
  Synthetic oligonucleotide
ggcatgcaaatatcttttca

SEQ ID NO: 1373 - DNA, 20 bp, Artificial sequence
  Synthetic oligonucleotide
catgacttcattctatcctc

SEQ ID NO: 1374 - DNA, 20 bp, Artificial sequence
  Synthetic oligonucleotide
tagctcatttatactacctc

SEQ ID NO: 1375 - DNA, 20 bp, Artificial sequence
  Synthetic oligonucleotide
tgtgtgcttttaccataaca

SEQ ID NO: 1376 - DNA, 20 bp, Artificial sequence
  Synthetic oligonucleotide
acaccataaaattactcata

SEQ ID NO: 1377 - DNA, 20 bp, Artificial sequence
  Synthetic oligonucleotide
gttatatacattacaaccat

SEQ ID NO: 1378 - DNA, 20 bp, Artificial sequence
  Synthetic oligonucleotide
gacagcactcctctatatct

SEQ ID NO: 1379 - DNA, 20 bp, Artificial sequence
  Synthetic oligonucleotide
cagttgctcattttcagacc

SEQ ID NO: 1380 - DNA, 20 bp, Artificial sequence
  Synthetic oligonucleotide
aagattattttaaatttctg

SEQ ID NO: 1381 - DNA, 20 bp, Artificial sequence
  Synthetic oligonucleotide
catcatctaaacttaaacct

SEQ ID NO: 1382 - DNA, 20 bp, Artificial sequence
  Synthetic oligonucleotide
acaatccagattatacatct

SEQ ID NO: 1383 - DNA, 20 bp, Artificial sequence
  Synthetic oligonucleotide
tcagtgctttttattcaaca

SEQ ID NO: 1384 - DNA, 20 bp, Artificial sequence
  Synthetic oligonucleotide
gatcaactaacatcaatctt

SEQ ID NO: 1385 - DNA, 20 bp, Artificial sequence
  Synthetic oligonucleotide
agtttctaatatcttgaacc

SEQ ID NO: 1386 - DNA, 20 bp, Artificial sequence
  Synthetic oligonucleotide
cttgttttaccacccatgct

SEQ ID NO: 1387 - DNA, 20 bp, Artificial sequence
  Synthetic oligonucleotide
tgcaaagtactatactggcc

SEQ ID NO: 1388 - DNA, 20 bp, Artificial sequence
  Synthetic oligonucleotide
ccatctacagctactaggaa

SEQ ID NO: 1389 - DNA, 20 bp, Artificial sequence
  Synthetic oligonucleotide
gatgtgctatttttgaagca

SEQ ID NO: 1390 - DNA, 20 bp, Artificial sequence
  Synthetic oligonucleotide
tgtctctaacatacattcta

SEQ ID NO: 1391 - DNA, 20 bp, Artificial sequence
  Synthetic oligonucleotide
tgctacatccagacaggctc

SEQ ID NO: 1392 - DNA, 20 bp, Artificial sequence
  Synthetic oligonucleotide
ttctgaccttttcatgggta

SEQ ID NO: 1393 - DNA, 20 bp, Artificial sequence
  Synthetic oligonucleotide
aagacatccaccaagcattt

SEQ ID NO: 1394 - DNA, 20 bp, Artificial sequence
  Synthetic oligonucleotide
tcttccttcccatcaggagc

SEQ ID NO: 1395 - DNA, 20 bp, Artificial sequence
  Synthetic oligonucleotide
tcaaaatttaattcacggca

SEQ ID NO: 1396 - DNA, 20 bp, Artificial sequence
  Synthetic oligonucleotide
gcacagacattacctctcca

SEQ ID NO: 1397 - DNA, 20 bp, Artificial sequence
  Synthetic oligonucleotide
gcacgcattccatacagaaa

SEQ ID NO: 1398 - DNA, 20 bp, Artificial sequence
  Synthetic oligonucleotide
aaagggtacccttatcaggc

SEQ ID NO: 1399 - DNA, 20 bp, Artificial sequence
  Synthetic oligonucleotide
gtaccttcagttaatcctca

SEQ ID NO: 1400 - DNA, 20 bp, Artificial sequence
  Synthetic oligonucleotide
gcattatcttcaattcatga

SEQ ID NO: 1401 - DNA, 20 bp, Artificial sequence
  Synthetic oligonucleotide
acaacagtcttcctttctct

SEQ ID NO: 1402 - DNA, 20 bp, Artificial sequence
  Synthetic oligonucleotide
actgcaccaatatcattaca

SEQ ID NO: 1403 - DNA, 20 bp, Artificial sequence
  Synthetic oligonucleotide
gaccatctcatcctgggcaa

SEQ ID NO: 1404 - DNA, 20 bp, Artificial sequence
  Synthetic oligonucleotide
tctgtgttaatttagagaaa

SEQ ID NO: 1405 - DNA, 20 bp, Artificial sequence
  Synthetic oligonucleotide
gcacccacatttccttcacc

SEQ ID NO: 1406 - DNA, 20 bp, Artificial sequence
  Synthetic oligonucleotide
gtactatttctctattgcac

SEQ ID NO: 1407 - DNA, 20 bp, Artificial sequence
  Synthetic oligonucleotide
ctgctgtcaatctcaccaga

SEQ ID NO: 1408 - DNA, 20 bp, Artificial sequence
  Synthetic oligonucleotide
acagaaaaaaattcttccgt

SEQ ID NO: 1409 - DNA, 20 bp, Artificial sequence
  Synthetic oligonucleotide
gcatctctttctataggtct

SEQ ID NO: 1410 - DNA, 20 bp, Artificial sequence
  Synthetic oligonucleotide
tgtctttgaattcttatgcc

SEQ ID NO: 1411 - DNA, 20 bp, Artificial sequence
  Synthetic oligonucleotide
gctatgtaactcaagggcaa

SEQ ID NO: 1412 - DNA, 20 bp, Artificial sequence
  Synthetic oligonucleotide
ctcagatgactttatcccca

SEQ ID NO: 1413 - DNA, 20 bp, Artificial sequence
  Synthetic oligonucleotide
atcatcttatttcagcgggc

SEQ ID NO: 1414 - DNA, 20 bp, Artificial sequence
  Synthetic oligonucleotide
tgctacactctaacacatat

SEQ ID NO: 1415 - DNA, 20 bp, Artificial sequence
  Synthetic oligonucleotide
tctgagcttttttctgctac

SEQ ID NO: 1416 - DNA, 20 bp, Artificial sequence
  Synthetic oligonucleotide
agctcatttatactacctcc

SEQ ID NO: 1417 - DNA, 20 bp, Artificial sequence
  Synthetic oligonucleotide
agaatggtttctaatacgaa

SEQ ID NO: 1418 - DNA, 20 bp, Artificial sequence
  Synthetic oligonucleotide
gttcaattaccataatggtt

SEQ ID NO: 1419 - DNA, 20 bp, Artificial sequence
  Synthetic oligonucleotide
gctttttattcaacatttta

SEQ ID NO: 1420 - DNA, 20 bp, Artificial sequence
  Synthetic oligonucleotide
cgtttttttatattttcctt

SEQ ID NO: 1421 - DNA, 20 bp, Artificial sequence
  Synthetic oligonucleotide
ggagaaactttctctcactt

SEQ ID NO: 1422 - DNA, 20 bp, Artificial sequence
  Synthetic oligonucleotide
acacaatttaatcctcacac

SEQ ID NO: 1423 - DNA, 20 bp, Artificial sequence
  Synthetic oligonucleotide
ccaagccacattcaagatct

SEQ ID NO: 1424 - DNA, 20 bp, Artificial sequence
  Synthetic oligonucleotide
tgaccatacaactaactggc

SEQ ID NO: 1425 - DNA, 20 bp, Artificial sequence
  Synthetic oligonucleotide
gcatcagcaattccaagtgc

SEQ ID NO: 1426 - DNA, 20 bp, Artificial sequence
  Synthetic oligonucleotide
tctaagcttatcaaattcct

SEQ ID NO: 1427 - DNA, 20 bp, Artificial sequence
  Synthetic oligonucleotide
cataccttaatttcattgtc

SEQ ID NO: 1428 - DNA, 20 bp, Artificial sequence
  Synthetic oligonucleotide
acagcactcctctatatctt

SEQ ID NO: 1429 - DNA, 20 bp, Artificial sequence
  Synthetic oligonucleotide
cttgtttaaacctttttctt

SEQ ID NO: 1430 - DNA, 20 bp, Artificial sequence
  Synthetic oligonucleotide
tacttgataacatcattcct

SEQ ID NO: 1431 - DNA, 20 bp, Artificial sequence
  Synthetic oligonucleotide
acctttttttttcctacttt

SEQ ID NO: 1432 - DNA, 20 bp, Artificial sequence
  Synthetic oligonucleotide
gcatgcttccttctgctcaa

SEQ ID NO: 1433 - DNA, 20 bp, Artificial sequence
  Synthetic oligonucleotide
gctgagagtctttctagaaa

SEQ ID NO: 1434 - DNA, 20 bp, Artificial sequence
  Synthetic oligonucleotide
ctattgtttttatatcagtc

SEQ ID NO: 1435 - DNA, 20 bp, Artificial sequence
  Synthetic oligonucleotide
tttcaggacatcatgcagtt

SEQ ID NO: 1436 - DNA, 20 bp, Artificial sequence
  Synthetic oligonucleotide
gcatgcaaatatcttttcac

SEQ ID NO: 1437 - DNA, 20 bp, Artificial sequence
  Synthetic oligonucleotide
agcaaagaccacattttctg

SEQ ID NO: 1438 - DNA, 20 bp, Artificial sequence
  Synthetic oligonucleotide
gaacggatttttaactttct

SEQ ID NO: 1439 - DNA, 20 bp, Artificial sequence
  Synthetic oligonucleotide
ctgtgtttccagcattacct

SEQ ID NO: 1440 - DNA, 20 bp, Artificial sequence
  Synthetic oligonucleotide
agtttgttaactactatact

SEQ ID NO: 1441 - DNA, 20 bp, Artificial sequence
  Synthetic oligonucleotide
atcaactaacatcaatcttc

SEQ ID NO: 1442 - DNA, 20 bp, Artificial sequence
  Synthetic oligonucleotide
ccatgactgtcaccaccaca

SEQ ID NO: 1443 - DNA, 20 bp, Artificial sequence
  Synthetic oligonucleotide
aatccagattatacatctcc

SEQ ID NO: 1444 - DNA, 20 bp, Artificial sequence
  Synthetic oligonucleotide
gttgcatcgcttcttggcct

SEQ ID NO: 1445 - DNA, 20 bp, Artificial sequence
  Synthetic oligonucleotide
cctcaattctagatacactc

SEQ ID NO: 1446 - DNA, 20 bp, Artificial sequence
  Synthetic oligonucleotide
cactaatctattctccatcc

SEQ ID NO: 1447 - DNA, 20 bp, Artificial sequence
  Synthetic oligonucleotide
ctcatattcatctccggagc

SEQ ID NO: 1448 - DNA, 20 bp, Artificial sequence
  Synthetic oligonucleotide
tcatgatcccaatctaacta

SEQ ID NO: 1449 - DNA, 20 bp, Artificial sequence
  Synthetic oligonucleotide
actacagtaaatttctggat

SEQ ID NO: 1450 - DNA, 20 bp, Artificial sequence
  Synthetic oligonucleotide
atcatctaaacttaaacctt

SEQ ID NO: 1451 - DNA, 20 bp, Artificial sequence
  Synthetic oligonucleotide
tccacagccaccctgtcctc

SEQ ID NO: 1452 - DNA, 20 bp, Artificial sequence
  Synthetic oligonucleotide
ctcagtttttcctcttgcca

SEQ ID NO: 1453 - DNA, 20 bp, Artificial sequence
  Synthetic oligonucleotide
tcaacaactttactataccc

SEQ ID NO: 1454 - DNA, 20 bp, Artificial sequence
  Synthetic oligonucleotide
gtttgattagaaactttctt

SEQ ID NO: 1455 - DNA, 20 bp, Artificial sequence
  Synthetic oligonucleotide
gtcattttcatcagctattc

SEQ ID NO: 1456 - DNA, 20 bp, Artificial sequence
  Synthetic oligonucleotide
acaactctaccttcatctgt

SEQ ID NO: 1457 - DNA, 20 bp, Artificial sequence
  Synthetic oligonucleotide
acagagttcctttatgggtt

SEQ ID NO: 1458 - DNA, 20 bp, Artificial sequence
  Synthetic oligonucleotide
catgttgttttctaaattcc

SEQ ID NO: 1459 - DNA, 20 bp, Artificial sequence
  Synthetic oligonucleotide
aggaggttttattttcctcc

SEQ ID NO: 1460 - DNA, 20 bp, Artificial sequence
  Synthetic oligonucleotide
acagatcattcaacttgctc

SEQ ID NO: 1461 - DNA, 20 bp, Artificial sequence
  Synthetic oligonucleotide
tgcctcttcccctatttctg

SEQ ID NO: 1462 - DNA, 20 bp, Artificial sequence
  Synthetic oligonucleotide
gtctgtctcctccaacagaa

SEQ ID NO: 1463 - DNA, 20 bp, Artificial sequence
  Synthetic oligonucleotide
gcctgataaaatctctgcaa

SEQ ID NO: 1464 - DNA, 20 bp, Artificial sequence
  Synthetic oligonucleotide
ccgcattcaaaatccagtca

SEQ ID NO: 1465 - DNA, 20 bp, Artificial sequence
  Synthetic oligonucleotide
tcatacacccttacactaga

SEQ ID NO: 1466 - DNA, 20 bp, Artificial sequence
  Synthetic oligonucleotide
acattacaaccattctttca

SEQ ID NO: 1467 - DNA, 20 bp, Artificial sequence
  Synthetic oligonucleotide
tttcagtttttttagagata

SEQ ID NO: 1468 - DNA, 20 bp, Artificial sequence
  Synthetic oligonucleotide
tgttccatcttcacagggcc

SEQ ID NO: 1469 - DNA, 20 bp, Artificial sequence
  Synthetic oligonucleotide
ctgatttaaatttcaggccg

SEQ ID NO: 1470 - DNA, 20 bp, Artificial sequence
  Synthetic oligonucleotide
taggtaattaatctgaactt

SEQ ID NO: 1471 - DNA, 20 bp, Artificial sequence
  Synthetic oligonucleotide
tctcacacacacaatccctg

SEQ ID NO: 1472 - DNA, 20 bp, Artificial sequence
  Synthetic oligonucleotide
ctacttgttatcatttctgt

SEQ ID NO: 1473 - DNA, 20 bp, Artificial sequence
  Synthetic oligonucleotide
tctctaacatacattctagc

SEQ ID NO: 1474 - DNA, 20 bp, Artificial sequence
  Synthetic oligonucleotide
ggcacacatcccataagtct

SEQ ID NO: 1475 - DNA, 20 bp, Artificial sequence
  Synthetic oligonucleotide
gccaagttttaaagagatta

SEQ ID NO: 1476 - DNA, 20 bp, Artificial sequence
  Synthetic oligonucleotide
gtttttttatattttcctta

SEQ ID NO: 1477 - DNA, 20 bp, Artificial sequence
  Synthetic oligonucleotide
acactctaacacatattcct

SEQ ID NO: 1478 - DNA, 20 bp, Artificial sequence
  Synthetic oligonucleotide
tcagtttttcctcttgccat

SEQ ID NO: 1479 - DNA, 20 bp, Artificial sequence
  Synthetic oligonucleotide
cccacatttccttcacctca

SEQ ID NO: 1480 - DNA, 20 bp, Artificial sequence
  Synthetic oligonucleotide
ggcaaatcatcataatcatc

SEQ ID NO: 1481 - DNA, 20 bp, Artificial sequence
  Synthetic oligonucleotide
tcatcagctattcagaactc

SEQ ID NO: 1482 - DNA, 20 bp, Artificial sequence
  Synthetic oligonucleotide
acagagttccaacatttcct

SEQ ID NO: 1483 - DNA, 20 bp, Artificial sequence
  Synthetic oligonucleotide
ccacattcaagatctcgact

SEQ ID NO: 1484 - DNA, 20 bp, Artificial sequence
  Synthetic oligonucleotide
aacggatttttaactttctt

SEQ ID NO: 1485 - DNA, 20 bp, Artificial sequence
  Synthetic oligonucleotide
acttgataacatcattcctt

SEQ ID NO: 1486 - DNA, 20 bp, Artificial sequence
  Synthetic oligonucleotide
ttcttcactttcaatctgct

SEQ ID NO: 1487 - DNA, 20 bp, Artificial sequence
  Synthetic oligonucleotide
cagatgactttatccccact

SEQ ID NO: 1488 - DNA, 20 bp, Artificial sequence
  Synthetic oligonucleotide
agtaatataaaatcttccta

SEQ ID NO: 1489 - DNA, 20 bp, Artificial sequence
  Synthetic oligonucleotide
ccttcagttaatcctcatct

SEQ ID NO: 1490 - DNA, 20 bp, Artificial sequence
  Synthetic oligonucleotide
gcacacatcccataagtctc

SEQ ID NO: 1491 - DNA, 20 bp, Artificial sequence
  Synthetic oligonucleotide
acaaccattctttcatgcat

SEQ ID NO: 1492 - DNA, 20 bp, Artificial sequence
  Synthetic oligonucleotide
ataccttaatttcattgtca

SEQ ID NO: 1493 - DNA, 20 bp, Artificial sequence
  Synthetic oligonucleotide
gagaaatgtatcatttccct

SEQ ID NO: 1494 - DNA, 20 bp, Artificial sequence
  Synthetic oligonucleotide
ccagcattacctctgagcga

SEQ ID NO: 1495 - DNA, 20 bp, Artificial sequence
  Synthetic oligonucleotide
aggtgtactcttacagcaac

SEQ ID NO: 1496 - DNA, 20 bp, Artificial sequence
  Synthetic oligonucleotide
gctttgaaatccactttgtc

SEQ ID NO: 1497 - DNA, 20 bp, Artificial sequence
  Synthetic oligonucleotide
aagggtacccttatcaggca

SEQ ID NO: 1498 - DNA, 20 bp, Artificial sequence
  Synthetic oligonucleotide
agatcattcaacttgctcca

SEQ ID NO: 1499 - DNA, 20 bp, Artificial sequence
  Synthetic oligonucleotide
ttccacctcaaatcatcatc

SEQ ID NO: 1500 - DNA, 20 bp, Artificial sequence
  Synthetic oligonucleotide
tcaacattttacatttgtgc

SEQ ID NO: 1501 - DNA, 20 bp, Artificial sequence
  Synthetic oligonucleotide
aggttttattttcctccgtt

SEQ ID NO: 1502 - DNA, 20 bp, Artificial sequence
  Synthetic oligonucleotide
gctttgatttttaccagtta

SEQ ID NO: 1503 - DNA, 20 bp, Artificial sequence
  Synthetic oligonucleotide
gtattgtaaattatgtgtca

SEQ ID NO: 1504 - DNA, 20 bp, Artificial sequence
  Synthetic oligonucleotide
gctcatttatactacctcct

SEQ ID NO: 1505 - DNA, 20 bp, Artificial sequence
  Synthetic oligonucleotide
cctcagttcattttagaaaa

SEQ ID NO: 1506 - DNA, 20 bp, Artificial sequence
  Synthetic oligonucleotide
atagattttttttaatgcca

SEQ ID NO: 1507 - DNA, 20 bp, Artificial sequence
  Synthetic oligonucleotide
cagtcagtcattcctcacac

SEQ ID NO: 1508 - DNA, 20 bp, Artificial sequence
  Synthetic oligonucleotide
ggactggaacatcttcgatc

SEQ ID NO: 1509 - DNA, 20 bp, Artificial sequence
  Synthetic oligonucleotide
cctttttttttcctactttt

SEQ ID NO: 1510 - DNA, 20 bp, Artificial sequence
  Synthetic oligonucleotide
tggtagttacctccaaaatt

SEQ ID NO: 1511 - DNA, 20 bp, Artificial sequence
  Synthetic oligonucleotide
ctgcaccaatatcattacac

SEQ ID NO: 1512 - DNA, 20 bp, Artificial sequence
  Synthetic oligonucleotide
agggaacattattcatttca

SEQ ID NO: 1513 - DNA, 20 bp, Artificial sequence
  Synthetic oligonucleotide
tcaactaacatcaatcttca

SEQ ID NO: 1514 - DNA, 20 bp, Artificial sequence
  Synthetic oligonucleotide
tttctttctttctcagcagt

SEQ ID NO: 1515 - DNA, 20 bp, Artificial sequence
  Synthetic oligonucleotide
atccagattatacatctcca

SEQ ID NO: 1516 - DNA, 20 bp, Artificial sequence
  Synthetic oligonucleotide
ttctgcctccttcattctct

SEQ ID NO: 1517 - DNA, 20 bp, Artificial sequence
  Synthetic oligonucleotide
caaggcagattaacatttcc

SEQ ID NO: 1518 - DNA, 20 bp, Artificial sequence
  Synthetic oligonucleotide
ttggcagtttctactgcagc

SEQ ID NO: 1519 - DNA, 20 bp, Artificial sequence
  Synthetic oligonucleotide
gaccatacaactaactggcc

SEQ ID NO: 1520 - DNA, 20 bp, Artificial sequence
  Synthetic oligonucleotide
accaggtactactcatggcc

SEQ ID NO: 1521 - DNA, 20 bp, Artificial sequence
  Synthetic oligonucleotide
ctaacatacattctagcccc

SEQ ID NO: 1522 - DNA, 20 bp, Artificial sequence
  Synthetic oligonucleotide
gtccagtatccatactgagc

SEQ ID NO: 1523 - DNA, 20 bp, Artificial sequence
  Synthetic oligonucleotide
tcttcccctatttctggctt

SEQ ID NO: 1524 - DNA, 20 bp, Artificial sequence
  Synthetic oligonucleotide
aaagtttaacttattctgca

SEQ ID NO: 1525 - DNA, 20 bp, Artificial sequence
  Synthetic oligonucleotide
gcaaagaccacattttctgt

SEQ ID NO: 1526 - DNA, 20 bp, Artificial sequence
  Synthetic oligonucleotide
attgtttttatatcagtcaa

SEQ ID NO: 1527 - DNA, 20 bp, Artificial sequence
  Synthetic oligonucleotide
actaatctattctccatccc

SEQ ID NO: 1528 - DNA, 20 bp, Artificial sequence
  Synthetic oligonucleotide
ttgtttaaacctttttcttc

SEQ ID NO: 1529 - DNA, 20 bp, Artificial sequence
  Synthetic oligonucleotide
cacaatttaatcctcacaca

SEQ ID NO: 1530 - DNA, 20 bp, Artificial sequence
  Synthetic oligonucleotide
taagaatcattttaagccac

SEQ ID NO: 1531 - DNA, 20 bp, Artificial sequence
  Synthetic oligonucleotide
atggtttctaatacgaacta

SEQ ID NO: 1532 - DNA, 20 bp, Artificial sequence
  Synthetic oligonucleotide
tttctctttatctctaggta

SEQ ID NO: 1533 - DNA, 20 bp, Artificial sequence
  Synthetic oligonucleotide
gcttatcaaattcctgataa

SEQ ID NO: 1534 - DNA, 20 bp, Artificial sequence
  Synthetic oligonucleotide
gctctccgaatcattttcta

SEQ ID NO: 1535 - DNA, 20 bp, Artificial sequence
  Synthetic oligonucleotide
gtttagtaataagataccca

SEQ ID NO: 1536 - DNA, 20 bp, Artificial sequence
  Synthetic oligonucleotide
accaacactgtcaattgatt

SEQ ID NO: 1537 - DNA, 20 bp, Artificial sequence
  Synthetic oligonucleotide
gtttgttaactactatacta

SEQ ID NO: 1538 - DNA, 20 bp, Artificial sequence
  Synthetic oligonucleotide
ggagaacctttttaatatca

SEQ ID NO: 1539 - DNA, 20 bp, Artificial sequence
  Synthetic oligonucleotide
tactatttctctattgcaca

SEQ ID NO: 1540 - DNA, 20 bp, Artificial sequence
  Synthetic oligonucleotide
tgtgagggttctaatggtgc

SEQ ID NO: 1541 - DNA, 20 bp, Artificial sequence
  Synthetic oligonucleotide
acatgccacatctaagccac

SEQ ID NO: 1542 - DNA, 20 bp, Artificial sequence
  Synthetic oligonucleotide
acagtcttcctttctcttgc

SEQ ID NO: 1543 - DNA, 20 bp, Artificial sequence
  Synthetic oligonucleotide
acaggaactttatattcaga

SEQ ID NO: 1544 - DNA, 20 bp, Artificial sequence
  Synthetic oligonucleotide
ctcaagataacattccatta

SEQ ID NO: 1545 - DNA, 20 bp, Artificial sequence
  Synthetic oligonucleotide
gagaaactttctctcacttt

SEQ ID NO: 1546 - DNA, 20 bp, Artificial sequence
  Synthetic oligonucleotide
ggataaactcatctgagcaa

SEQ ID NO: 1547 - DNA, 20 bp, Artificial sequence
  Synthetic oligonucleotide
ttgtttttcatttaaggctg

SEQ ID NO: 1548 - DNA, 20 bp, Artificial sequence
  Synthetic oligonucleotide
aatgaagatctctatttccc

SEQ ID NO: 1549 - DNA, 20 bp, Artificial sequence
  Synthetic oligonucleotide
aggaaactgactactcagcc

SEQ ID NO: 1550 - DNA, 20 bp, Artificial sequence
  Synthetic oligonucleotide
tgtgtgtaaaatctccctct

SEQ ID NO: 1551 - DNA, 20 bp, Artificial sequence
  Synthetic oligonucleotide
ctgacatttccctatcccct

SEQ ID NO: 1552 - DNA, 20 bp, Artificial sequence
  Synthetic oligonucleotide
ggtcacctatatctttcaga

SEQ ID NO: 1553 - DNA, 20 bp, Artificial sequence
  Synthetic oligonucleotide
ttttccttaaattctgttca

SEQ ID NO: 1554 - DNA, 20 bp, Artificial sequence
  Synthetic oligonucleotide
tgcaccaatatcattacaca

SEQ ID NO: 1555 - DNA, 20 bp, Artificial sequence
  Synthetic oligonucleotide
cgttgtattctacaatagca

SEQ ID NO: 1556 - DNA, 20 bp, Artificial sequence
  Synthetic oligonucleotide
agttacctccaaaattctaa

SEQ ID NO: 1557 - DNA, 20 bp, Artificial sequence
  Synthetic oligonucleotide
gactccagtcctattctcct

SEQ ID NO: 1558 - DNA, 20 bp, Artificial sequence
  Synthetic oligonucleotide
aaggatacacaccaacaaca

SEQ ID NO: 1559 - DNA, 20 bp, Artificial sequence
  Synthetic oligonucleotide
cttcagttaatcctcatctt

SEQ ID NO: 1560 - DNA, 20 bp, Artificial sequence
  Synthetic oligonucleotide
gtttcttgaatttttttccc

SEQ ID NO: 1561 - DNA, 20 bp, Artificial sequence
  Synthetic oligonucleotide
tcctctttcactgcttctac

SEQ ID NO: 1562 - DNA, 20 bp, Artificial sequence
  Synthetic oligonucleotide
cagctattcagaactcagaa

SEQ ID NO: 1563 - DNA, 20 bp, Artificial sequence
  Synthetic oligonucleotide
accagagtacttcctaactc

SEQ ID NO: 1564 - DNA, 20 bp, Artificial sequence
  Synthetic oligonucleotide
aaaccttaatttcattgtca

SEQ ID NO: 1565 - DNA, 20 bp, Artificial sequence
  Synthetic oligonucleotide
gactttatccccactttctc

SEQ ID NO: 1566 - DNA, 20 bp, Artificial sequence
  Synthetic oligonucleotide
ggagataaattgctcagcca

SEQ ID NO: 1567 - DNA, 20 bp, Artificial sequence
  Synthetic oligonucleotide
gcactttgcaataatacagc

SEQ ID NO: 1568 - DNA, 20 bp, Artificial sequence
  Synthetic oligonucleotide
gagaacctttttaatatcaa

SEQ ID NO: 1569 - DNA, 20 bp, Artificial sequence
  Synthetic oligonucleotide
tcctttttatatatatgtga

SEQ ID NO: 1570 - DNA, 20 bp, Artificial sequence
  Synthetic oligonucleotide
gcaaaattcaattccagaga

SEQ ID NO: 1571 - DNA, 20 bp, Artificial sequence
  Synthetic oligonucleotide
ctaatctattctccatccct

SEQ ID NO: 1572 - DNA, 20 bp, Artificial sequence
  Synthetic oligonucleotide
tgcacattccaagtttggct

SEQ ID NO: 1573 - DNA, 20 bp, Artificial sequence
  Synthetic oligonucleotide
tagattttttttaatgccaa

SEQ ID NO: 1574 - DNA, 20 bp, Artificial sequence
  Synthetic oligonucleotide
tacattttactccaatgcca

SEQ ID NO: 1575 - DNA, 20 bp, Artificial sequence
  Synthetic oligonucleotide
tccagattatacatctccat

SEQ ID NO: 1576 - DNA, 20 bp, Artificial sequence
  Synthetic oligonucleotide
ggtcacagcttttatttcca

SEQ ID NO: 1577 - DNA, 20 bp, Artificial sequence
  Synthetic oligonucleotide
ttcaccatttttattattct

SEQ ID NO: 1578 - DNA, 20 bp, Artificial sequence
  Synthetic oligonucleotide
ttatcaggcatttcatggaa

SEQ ID NO: 1579 - DNA, 20 bp, Artificial sequence
  Synthetic oligonucleotide
gcacaataaaaaccctgaca

SEQ ID NO: 1580 - DNA, 20 bp, Artificial sequence
  Synthetic oligonucleotide
gctctccacattcattttcc

SEQ ID NO: 1581 - DNA, 20 bp, Artificial sequence
  Synthetic oligonucleotide
gttgagttcttccattggca

SEQ ID NO: 1582 - DNA, 20 bp, Artificial sequence
  Synthetic oligonucleotide
cactctaacacatattcctt

SEQ ID NO: 1583 - DNA, 20 bp, Artificial sequence
  Synthetic oligonucleotide
tccacctcaaatcatcatca

SEQ ID NO: 1584 - DNA, 20 bp, Artificial sequence
  Synthetic oligonucleotide
acagtctaatacctactcta

SEQ ID NO: 1585 - DNA, 20 bp, Artificial sequence
  Synthetic oligonucleotide
gtttaacttattctgcagtc

SEQ ID NO: 1586 - DNA, 20 bp, Artificial sequence
  Synthetic oligonucleotide
gtatcatttccctcatttcc

SEQ ID NO: 1587 - DNA, 20 bp, Artificial sequence
  Synthetic oligonucleotide
acgaagcattttctttcctt

SEQ ID NO: 1588 - DNA, 20 bp, Artificial sequence
  Synthetic oligonucleotide
agggatagacagactagcct

SEQ ID NO: 1589 - DNA, 20 bp, Artificial sequence
  Synthetic oligonucleotide
aggcagtaacatcaatatca

SEQ ID NO: 1590 - DNA, 20 bp, Artificial sequence
  Synthetic oligonucleotide
tcagcttgacacacatttaa

SEQ ID NO: 1591 - DNA, 20 bp, Artificial sequence
  Synthetic oligonucleotide
gataacatcattccttgcat

SEQ ID NO: 1592 - DNA, 20 bp, Artificial sequence
  Synthetic oligonucleotide
gcctggttttctcagagcct

SEQ ID NO: 1593 - DNA, 20 bp, Artificial sequence
  Synthetic oligonucleotide
tgtgtattatatttatttct

SEQ ID NO: 1594 - DNA, 20 bp, Artificial sequence
  Synthetic oligonucleotide
aggcagattaacatttcctg

SEQ ID NO: 1595 - DNA, 20 bp, Artificial sequence
  Synthetic oligonucleotide
gactgaacttctccaggccc

SEQ ID NO: 1596 - DNA, 20 bp, Artificial sequence
  Synthetic oligonucleotide
gtcttcctttctcttgcaat

SEQ ID NO: 1597 - DNA, 20 bp, Artificial sequence
  Synthetic oligonucleotide
ccaggtactactcatggcct

SEQ ID NO: 1598 - DNA, 20 bp, Artificial sequence
  Synthetic oligonucleotide
actaacatcaatcttcatta

SEQ ID NO: 1599 - DNA, 20 bp, Artificial sequence
  Synthetic oligonucleotide
tgttaactactatactatta

SEQ ID NO: 1600 - DNA, 20 bp, Artificial sequence
  Synthetic oligonucleotide
ttagcagtatttcagacctt

SEQ ID NO: 1601 - DNA, 20 bp, Artificial sequence
  Synthetic oligonucleotide
tccttcattctcttacaatc

SEQ ID NO: 1602 - DNA, 20 bp, Artificial sequence
  Synthetic oligonucleotide
gccagagtcacctcacgggc

SEQ ID NO: 1603 - DNA, 20 bp, Artificial sequence
  Synthetic oligonucleotide
gtttttatatcagtcaatcc

SEQ ID NO: 1604 - DNA, 20 bp, Artificial sequence
  Synthetic oligonucleotide
agtcagtcattcctcacact

SEQ ID NO: 1605 - DNA, 20 bp, Artificial sequence
  Synthetic oligonucleotide
attcaagtatttcctctgac

SEQ ID NO: 1606 - DNA, 20 bp, Artificial sequence
  Synthetic oligonucleotide
tggtttctaatacgaactac

SEQ ID NO: 1607 - DNA, 20 bp, Artificial sequence
  Synthetic oligonucleotide
ctcatttatactacctccta

SEQ ID NO: 1608 - DNA, 20 bp, Artificial sequence
  Synthetic oligonucleotide
caaccattctttcatgcatt

SEQ ID NO: 1609 - DNA, 20 bp, Artificial sequence
  Synthetic oligonucleotide
acattattcatttcagtgtc

SEQ ID NO: 1610 - DNA, 20 bp, Artificial sequence
  Synthetic oligonucleotide
acagcaacaaatattttcaa

SEQ ID NO: 1611 - DNA, 20 bp, Artificial sequence
  Synthetic oligonucleotide
aggtattttatttttcctcc

SEQ ID NO: 1612 - DNA, 20 bp, Artificial sequence
  Synthetic oligonucleotide
acattaatttttcctagaat

SEQ ID NO: 1613 - DNA, 20 bp, Artificial sequence
  Synthetic oligonucleotide
gccacaaaaacattgatccc

SEQ ID NO: 1614 - DNA, 20 bp, Artificial sequence
  Synthetic oligonucleotide
cagttgtgacttatgagcca

SEQ ID NO: 1615 - DNA, 20 bp, Artificial sequence
  Synthetic oligonucleotide
aaggttattttccatagtga

SEQ ID NO: 1616 - DNA, 20 bp, Artificial sequence
  Synthetic oligonucleotide
gcaaatcatcataatcatct

SEQ ID NO: 1617 - DNA, 20 bp, Artificial sequence
  Synthetic oligonucleotide
tgtctgatattaacagaacc

SEQ ID NO: 1618 - DNA, 20 bp, Artificial sequence
  Synthetic oligonucleotide
tggttttgctttcatgctgc

SEQ ID NO: 1619 - DNA, 20 bp, Artificial sequence
  Synthetic oligonucleotide
ccacatttccttcacctcat

SEQ ID NO: 1620 - DNA, 20 bp, Artificial sequence
  Synthetic oligonucleotide
tgtttaaacctttttcttca

SEQ ID NO: 1621 - DNA, 20 bp, Artificial sequence
  Synthetic oligonucleotide
cagttcattttagaaaaccc

SEQ ID NO: 1622 - DNA, 20 bp, Artificial sequence
  Synthetic oligonucleotide
gttttattttcctccgttta

SEQ ID NO: 1623 - DNA, 20 bp, Artificial sequence
  Synthetic oligonucleotide
catcaatgatatcccttcta

SEQ ID NO: 1624 - DNA, 20 bp, Artificial sequence
  Synthetic oligonucleotide
gtctatgtccttcattagaa

SEQ ID NO: 1625 - DNA, 20 bp, Artificial sequence
  Synthetic oligonucleotide
tcttcactttcaatctgctc

SEQ ID NO: 1626 - DNA, 20 bp, Artificial sequence
  Synthetic oligonucleotide
gttccaacatttcctccact

SEQ ID NO: 1627 - DNA, 20 bp, Artificial sequence
  Synthetic oligonucleotide
tcgatcggaaatatctgcaa

SEQ ID NO: 1628 - DNA, 20 bp, Artificial sequence
  Synthetic oligonucleotide
agaacacttaatccatggtc

SEQ ID NO: 1629 - DNA, 20 bp, Artificial sequence
  Synthetic oligonucleotide
ctctccacattcattttcct

SEQ ID NO: 1630 - DNA, 20 bp, Artificial sequence
  Synthetic oligonucleotide
tgttcattaaacatgtatta

SEQ ID NO: 1631 - DNA, 20 bp, Artificial sequence
  Synthetic oligonucleotide
ggtttagtaattatttgctt

SEQ ID NO: 1632 - DNA, 20 bp, Artificial sequence
  Synthetic oligonucleotide
acctcaaatcatcatcaggc

SEQ ID NO: 1633 - DNA, 20 bp, Artificial sequence
  Synthetic oligonucleotide
acacatattcctttatttta

SEQ ID NO: 1634 - DNA, 20 bp, Artificial sequence
  Synthetic oligonucleotide
tcaccatttttattattcta

SEQ ID NO: 1635 - DNA, 20 bp, Artificial sequence
  Synthetic oligonucleotide
ggcagattaacatttcctgc

SEQ ID NO: 1636 - DNA, 20 bp, Artificial sequence
  Synthetic oligonucleotide
tttaaacctttttcttcaca

SEQ ID NO: 1637 - DNA, 20 bp, Artificial sequence
  Synthetic oligonucleotide
gtaacatcaatatcacatgc

SEQ ID NO: 1638 - DNA, 20 bp, Artificial sequence
  Synthetic oligonucleotide
gcctagattccttagaacca

SEQ ID NO: 1639 - DNA, 20 bp, Artificial sequence
  Synthetic oligonucleotide
cactcattaattcaataaac

SEQ ID NO: 1640 - DNA, 20 bp, Artificial sequence
  Synthetic oligonucleotide
atatttttattttcaggaca

SEQ ID NO: 1641 - DNA, 20 bp, Artificial sequence
  Synthetic oligonucleotide
caagtcagaatcctcctctt

SEQ ID NO: 1642 - DNA, 20 bp, Artificial sequence
  Synthetic oligonucleotide
ggttgacttatttacaggaa

SEQ ID NO: 1643 - DNA, 20 bp, Artificial sequence
  Synthetic oligonucleotide
tgtgattgcatttagtgcct

SEQ ID NO: 1644 - DNA, 20 bp, Artificial sequence
  Synthetic oligonucleotide
gagaaggattcatcactctc

SEQ ID NO: 1645 - DNA, 20 bp, Artificial sequence
  Synthetic oligonucleotide
tccaaaattctaactgctgt

SEQ ID NO: 1646 - DNA, 20 bp, Artificial sequence
  Synthetic oligonucleotide
aagcctctatattttggtct

SEQ ID NO: 1647 - DNA, 20 bp, Artificial sequence
  Synthetic oligonucleotide
gcaccaatatcattacacac

SEQ ID NO: 1648 - DNA, 20 bp, Artificial sequence
  Synthetic oligonucleotide
tgccttttcattttaattca

SEQ ID NO: 1649 - DNA, 20 bp, Artificial sequence
  Synthetic oligonucleotide
gccatgctgctctaatagac

SEQ ID NO: 1650 - DNA, 20 bp, Artificial sequence
  Synthetic oligonucleotide
tatcatttccctcatttccc

SEQ ID NO: 1651 - DNA, 20 bp, Artificial sequence
  Synthetic oligonucleotide
catgtgttttttaaagcagt

SEQ ID NO: 1652 - DNA, 20 bp, Artificial sequence
  Synthetic oligonucleotide
gtcacagcttttatttccat

SEQ ID NO: 1653 - DNA, 20 bp, Artificial sequence
  Synthetic oligonucleotide
caaaagactttcaaatttcc

SEQ ID NO: 1654 - DNA, 20 bp, Artificial sequence
  Synthetic oligonucleotide
ttcaagtatttcctctgacc

SEQ ID NO: 1655 - DNA, 20 bp, Artificial sequence
  Synthetic oligonucleotide
ggtctttgaaatgatagatc

SEQ ID NO: 1656 - DNA, 20 bp, Artificial sequence
  Synthetic oligonucleotide
acctttttaatatcaagggc

SEQ ID NO: 1657 - DNA, 20 bp, Artificial sequence
  Synthetic oligonucleotide
ctgatattaacagaaccagt

SEQ ID NO: 1658 - DNA, 20 bp, Artificial sequence
  Synthetic oligonucleotide
tacaaagttcttattttctc

SEQ ID NO: 1659 - DNA, 20 bp, Artificial sequence
  Synthetic oligonucleotide
tgtcatttgcaaaattgcca

SEQ ID NO: 1660 - DNA, 20 bp, Artificial sequence
  Synthetic oligonucleotide
acatatatttttaaagatca

SEQ ID NO: 1661 - DNA, 20 bp, Artificial sequence
  Synthetic oligonucleotide
tggaaaggttcaacatgcta

SEQ ID NO: 1662 - DNA, 20 bp, Artificial sequence
  Synthetic oligonucleotide
ccaaatgtaaatattccatt

SEQ ID NO: 1663 - DNA, 20 bp, Artificial sequence
  Synthetic oligonucleotide
atcaatgatatcccttctaa

SEQ ID NO: 1664 - DNA, 20 bp, Artificial sequence
  Synthetic oligonucleotide
atctgcaatttaactggaca

SEQ ID NO: 1665 - DNA, 20 bp, Artificial sequence
  Synthetic oligonucleotide
ttgcaattcaaatatgagca

SEQ ID NO: 1666 - DNA, 20 bp, Artificial sequence
  Synthetic oligonucleotide
ttgatcccattttatggtta

SEQ ID NO: 1667 - DNA, 20 bp, Artificial sequence
  Synthetic oligonucleotide
ggacacagaattcccatgga

SEQ ID NO: 1668 - DNA, 20 bp, Artificial sequence
  Synthetic oligonucleotide
tacgcgccaaacagcaatca

SEQ ID NO: 1669 - DNA, 20 bp, Artificial sequence
  Synthetic oligonucleotide
tcctcatcttttataaagta

SEQ ID NO: 1670 - DNA, 20 bp, Artificial sequence
  Synthetic oligonucleotide
ccatccctaaaactgtgcca

SEQ ID NO: 1671 - DNA, 20 bp, Artificial sequence
  Synthetic oligonucleotide
aaggaagtaattaacggatt

SEQ ID NO: 1672 - DNA, 20 bp, Artificial sequence
  Synthetic oligonucleotide
ggtatgtacatttcctgtca

SEQ ID NO: 1673 - DNA, 20 bp, Artificial sequence
  Synthetic oligonucleotide
ggatacacaccaacaacacc

SEQ ID NO: 1674 - DNA, 20 bp, Artificial sequence
  Synthetic oligonucleotide
catggaaattacatttggaa

SEQ ID NO: 1675 - DNA, 20 bp, Artificial sequence
  Synthetic oligonucleotide
ataacatcattccttgcatc

SEQ ID NO: 1676 - DNA, 20 bp, Artificial sequence
  Synthetic oligonucleotide
tcctagaatccttttggctt

SEQ ID NO: 1677 - DNA, 20 bp, Artificial sequence
  Synthetic oligonucleotide
ctgcagattctaccttcata

SEQ ID NO: 1678 - DNA, 20 bp, Artificial sequence
  Synthetic oligonucleotide
agccatggaacaattcccta

SEQ ID NO: 1679 - DNA, 20 bp, Artificial sequence
  Synthetic oligonucleotide
gcattttctttccttgttac

SEQ ID NO: 1680 - DNA, 20 bp, Artificial sequence
  Synthetic oligonucleotide
tactctatatataccaggct

SEQ ID NO: 1681 - DNA, 20 bp, Artificial sequence
  Synthetic oligonucleotide
gggaaagcaatcattctaga

SEQ ID NO: 1682 - DNA, 20 bp, Artificial sequence
  Synthetic oligonucleotide
aggcatgtcacaatacattt

SEQ ID NO: 1683 - DNA, 20 bp, Artificial sequence
  Synthetic oligonucleotide
gtaaaagcaactccatttct

SEQ ID NO: 1684 - DNA, 20 bp, Artificial sequence
  Synthetic oligonucleotide
gaactcagaaaacagtatca

SEQ ID NO: 1685 - DNA, 20 bp, Artificial sequence
  Synthetic oligonucleotide
tctttcagaaacattaacag

SEQ ID NO: 1686 - DNA, 20 bp, Artificial sequence
  Synthetic oligonucleotide
agatactttctaaattgctt

SEQ ID NO: 1687 - DNA, 20 bp, Artificial sequence
  Synthetic oligonucleotide
atattgttaaaaattctcca

SEQ ID NO: 1688 - DNA, 20 bp, Artificial sequence
  Synthetic oligonucleotide
ccagtcctattctcctggaa

SEQ ID NO: 1689 - DNA, 20 bp, Artificial sequence
  Synthetic oligonucleotide
agaaatttcactcatcccta

SEQ ID NO: 1690 - DNA, 20 bp, Artificial sequence
  Synthetic oligonucleotide
agctcaataaatctttatca

SEQ ID NO: 1691 - DNA, 20 bp, Artificial sequence
  Synthetic oligonucleotide
aagcaaacatttttacaaca

SEQ ID NO: 1692 - DNA, 20 bp, Artificial sequence
  Synthetic oligonucleotide
atttccttcacctcatctgc

SEQ ID NO: 1693 - DNA, 20 bp, Artificial sequence
  Synthetic oligonucleotide
cagcaacaaatattttcaac

SEQ ID NO: 1694 - DNA, 20 bp, Artificial sequence
  Synthetic oligonucleotide
ttccaacatttcctccactt

SEQ ID NO: 1695 - DNA, 20 bp, Artificial sequence
  Synthetic oligonucleotide
ctcaaggctattctcaactc

SEQ ID NO: 1696 - DNA, 20 bp, Artificial sequence
  Synthetic oligonucleotide
ttgaatttttttccctgaga

SEQ ID NO: 1697 - DNA, 20 bp, Artificial sequence
  Synthetic oligonucleotide
tttaacttattctgcagtca

SEQ ID NO: 1698 - DNA, 20 bp, Artificial sequence
  Synthetic oligonucleotide
gttcaaaaaatccaattgct

SEQ ID NO: 1699 - DNA, 20 bp, Artificial sequence
  Synthetic oligonucleotide
gacttattaataatttactt

SEQ ID NO: 1700 - DNA, 20 bp, Artificial sequence
  Synthetic oligonucleotide
tttgtaaattctccatggta

SEQ ID NO: 1701 - DNA, 20 bp, Artificial sequence
  Synthetic oligonucleotide
ttctcttacaatcagtgtct

SEQ ID NO: 1702 - DNA, 20 bp, Artificial sequence
  Synthetic oligonucleotide
ccagagtacttcctaactcc

SEQ ID NO: 1703 - DNA, 20 bp, Artificial sequence
  Synthetic oligonucleotide
cagcttgacacacatttaaa

SEQ ID NO: 1704 - DNA, 20 bp, Artificial sequence
  Synthetic oligonucleotide
tgtattatatttatttctct

SEQ ID NO: 1705 - DNA, 20 bp, Artificial sequence
  Synthetic oligonucleotide
tcagtcattcctcacactgc

SEQ ID NO: 1706 - DNA, 20 bp, Artificial sequence
  Synthetic oligonucleotide
cctcaaatcatcatcaggca

SEQ ID NO: 1707 - DNA, 20 bp, Artificial sequence
  Synthetic oligonucleotide
gatacacaccaacaacacct

SEQ ID NO: 1708 - DNA, 20 bp, Artificial sequence
  Synthetic oligonucleotide
gcagcaggaatttctgcaac

SEQ ID NO: 1709 - DNA, 20 bp, Artificial sequence
  Synthetic oligonucleotide
cagattaacatttcctgctc

SEQ ID NO: 1710 - DNA, 20 bp, Artificial sequence
  Synthetic oligonucleotide
ccctcatttccctaatacat

SEQ ID NO: 1711 - DNA, 20 bp, Artificial sequence
  Synthetic oligonucleotide
ggaacaattccctactatca

SEQ ID NO: 1712 - DNA, 20 bp, Artificial sequence
  Synthetic oligonucleotide
gttaactgactacaatcaac

SEQ ID NO: 1713 - DNA, 20 bp, Artificial sequence
  Synthetic oligonucleotide
ctagcttgcatctaattctt

SEQ ID NO: 1714 - DNA, 20 bp, Artificial sequence
  Synthetic oligonucleotide
gttgacttatttacaggaaa

SEQ ID NO: 1715 - DNA, 20 bp, Artificial sequence
  Synthetic oligonucleotide
agcaaacatttttacaacaa

SEQ ID NO: 1716 - DNA, 20 bp, Artificial sequence
  Synthetic oligonucleotide
acaaagaacatctaacacct

SEQ ID NO: 1717 - DNA, 20 bp, Artificial sequence
  Synthetic oligonucleotide
agtgtgtttgtaacacctaa

SEQ ID NO: 1718 - DNA, 20 bp, Artificial sequence
  Synthetic oligonucleotide
gatgatgtaaccatataatc

SEQ ID NO: 1719 - DNA, 20 bp, Artificial sequence
  Synthetic oligonucleotide
tggtaactactttaaggtct

SEQ ID NO: 1720 - DNA, 20 bp, Artificial sequence
  Synthetic oligonucleotide
gctttcatcaatcttacttt

SEQ ID NO: 1721 - DNA, 20 bp, Artificial sequence
  Synthetic oligonucleotide
aaagcaatcattctagagca

SEQ ID NO: 1722 - DNA, 20 bp, Artificial sequence
  Synthetic oligonucleotide
cctttttaatatcaagggct

SEQ ID NO: 1723 - DNA, 20 bp, Artificial sequence
  Synthetic oligonucleotide
acatattcctttattttact

SEQ ID NO: 1724 - DNA, 20 bp, Artificial sequence
  Synthetic oligonucleotide
atgcacacactcacatgctt

SEQ ID NO: 1725 - DNA, 20 bp, Artificial sequence
  Synthetic oligonucleotide
acattcattttcctgggata

SEQ ID NO: 1726 - DNA, 20 bp, Artificial sequence
  Synthetic oligonucleotide
aacaaatattttcaactggc

SEQ ID NO: 1727 - DNA, 20 bp, Artificial sequence
  Synthetic oligonucleotide
gcatgtcacaatacatttta

SEQ ID NO: 1728 - DNA, 20 bp, Artificial sequence
  Synthetic oligonucleotide
accaatatcattacacactt

SEQ ID NO: 1729 - DNA, 20 bp, Artificial sequence
  Synthetic oligonucleotide
tcaagtatttcctctgacct

SEQ ID NO: 1730 - DNA, 20 bp, Artificial sequence
  Synthetic oligonucleotide
gtattatatttatttctcta

SEQ ID NO: 1731 - DNA, 20 bp, Artificial sequence
  Synthetic oligonucleotide
aaacctttttcttcacagct

SEQ ID NO: 1732 - DNA, 20 bp, Artificial sequence
  Synthetic oligonucleotide
agtgacattttcccaggagc

SEQ ID NO: 1733 - DNA, 20 bp, Artificial sequence
  Synthetic oligonucleotide
tcaaggctattctcaactca

SEQ ID NO: 1734 - DNA, 20 bp, Artificial sequence
  Synthetic oligonucleotide
taggaagttctaacataggc

SEQ ID NO: 1735 - DNA, 20 bp, Artificial sequence
  Synthetic oligonucleotide
gccttttcattttaattcaa

SEQ ID NO: 1736 - DNA, 20 bp, Artificial sequence
  Synthetic oligonucleotide
cagtcattcctcacactgcc

SEQ ID NO: 1737 - DNA, 20 bp, Artificial sequence
  Synthetic oligonucleotide
acagcactgctttcatacta

SEQ ID NO: 1738 - DNA, 20 bp, Artificial sequence
  Synthetic oligonucleotide
aagcatcacactatatacta

SEQ ID NO: 1739 - DNA, 20 bp, Artificial sequence
  Synthetic oligonucleotide
tcagaatcctcctcttctcc

SEQ ID NO: 1740 - DNA, 20 bp, Artificial sequence
  Synthetic oligonucleotide
caccatttttattattctaa

SEQ ID NO: 1741 - DNA, 20 bp, Artificial sequence
  Synthetic oligonucleotide
aaagactttcaaatttccct

SEQ ID NO: 1742 - DNA, 20 bp, Artificial sequence
  Synthetic oligonucleotide
acagtcataataataaggtt

SEQ ID NO: 1743 - DNA, 20 bp, Artificial sequence
  Synthetic oligonucleotide
gagaagattacaaattgctg

SEQ ID NO: 1744 - DNA, 20 bp, Artificial sequence
  Synthetic oligonucleotide
aacatcaatatcacatgcct

SEQ ID NO: 1745 - DNA, 20 bp, Artificial sequence
  Synthetic oligonucleotide
gcctataccatacaattctc

SEQ ID NO: 1746 - DNA, 20 bp, Artificial sequence
  Synthetic oligonucleotide
gctcaataaatctttatcag

SEQ ID NO: 1747 - DNA, 20 bp, Artificial sequence
  Synthetic oligonucleotide
agctgagttcctaattcaga

SEQ ID NO: 1748 - DNA, 20 bp, Artificial sequence
  Synthetic oligonucleotide
tccaacatttcctccactta

SEQ ID NO: 1749 - DNA, 20 bp, Artificial sequence
  Synthetic oligonucleotide
ccaaagccattatcttgcct

SEQ ID NO: 1750 - DNA, 20 bp, Artificial sequence
  Synthetic oligonucleotide
tgctgctatcccttgcagca

SEQ ID NO: 1751 - DNA, 20 bp, Artificial sequence
  Synthetic oligonucleotide
acacaactatgatacagcaa

SEQ ID NO: 1752 - DNA, 20 bp, Artificial sequence
  Synthetic oligonucleotide
agtccacacctctaactctc

SEQ ID NO: 1753 - DNA, 20 bp, Artificial sequence
  Synthetic oligonucleotide
gtttagtaattatttgcttt

SEQ ID NO: 1754 - DNA, 20 bp, Artificial sequence
  Synthetic oligonucleotide
aacagcaatcatcctagaat

SEQ ID NO: 1755 - DNA, 20 bp, Artificial sequence
  Synthetic oligonucleotide
ggttgagtaaataatcccta

SEQ ID NO: 1756 - DNA, 20 bp, Artificial sequence
  Synthetic oligonucleotide
ctcatcttttataaagtaca

SEQ ID NO: 1757 - DNA, 20 bp, Artificial sequence
  Synthetic oligonucleotide
aaagtgttagcatcatcata

SEQ ID NO: 1758 - DNA, 20 bp, Artificial sequence
  Synthetic oligonucleotide
gcacggatttcacaacggtg

SEQ ID NO: 1759 - DNA, 20 bp, Artificial sequence
  Synthetic oligonucleotide
gtttcactaaaatctcaaac

SEQ ID NO: 1760 - DNA, 20 bp, Artificial sequence
  Synthetic oligonucleotide
gcagaaggttcaccaggtaa

SEQ ID NO: 1761 - DNA, 20 bp, Artificial sequence
  Synthetic oligonucleotide
gaaggattcatcactctctc

SEQ ID NO: 1762 - DNA, 20 bp, Artificial sequence
  Synthetic oligonucleotide
aaacatagaatcatacagta

SEQ ID NO: 1763 - DNA, 20 bp, Artificial sequence
  Synthetic oligonucleotide
ggacatatgctcatttgtta

SEQ ID NO: 1764 - DNA, 20 bp, Artificial sequence
  Synthetic oligonucleotide
agtcatggaaatacactcac

SEQ ID NO: 1765 - DNA, 20 bp, Artificial sequence
  Synthetic oligonucleotide
agcaaagatataattaagat

SEQ ID NO: 1766 - DNA, 20 bp, Artificial sequence
  Synthetic oligonucleotide
ggaaaactgctctcaacatc

SEQ ID NO: 1767 - DNA, 20 bp, Artificial sequence
  Synthetic oligonucleotide
gtctcaacttttaagtgaaa

SEQ ID NO: 1768 - DNA, 20 bp, Artificial sequence
  Synthetic oligonucleotide
acatgaccgcatactaccca

SEQ ID NO: 1769 - DNA, 20 bp, Artificial sequence
  Synthetic oligonucleotide
aagcatatatttacacgaac

SEQ ID NO: 1770 - DNA, 20 bp, Artificial sequence
  Synthetic oligonucleotide
agctacacttttatatttcc

SEQ ID NO: 1771 - DNA, 20 bp, Artificial sequence
  Synthetic oligonucleotide
tcacagcttttatttccata

SEQ ID NO: 1772 - DNA, 20 bp, Artificial sequence
  Synthetic oligonucleotide
agatagccccctcatctcaa

SEQ ID NO: 1773 - DNA, 20 bp, Artificial sequence
  Synthetic oligonucleotide
tggaagataaacctgtaaca

SEQ ID NO: 1774 - DNA, 20 bp, Artificial sequence
  Synthetic oligonucleotide
tttgaacaatttcattcaac

SEQ ID NO: 1775 - DNA, 20 bp, Artificial sequence
  Synthetic oligonucleotide
acagaagtttttataaagtt

SEQ ID NO: 1776 - DNA, 20 bp, Artificial sequence
  Synthetic oligonucleotide
cctagattccttagaaccaa

SEQ ID NO: 1777 - DNA, 20 bp, Artificial sequence
  Synthetic oligonucleotide
gcttgacacacatttaaaaa

SEQ ID NO: 1778 - DNA, 20 bp, Artificial sequence
  Synthetic oligonucleotide
cagagtacttcctaactcct

SEQ ID NO: 1779 - DNA, 20 bp, Artificial sequence
  Synthetic oligonucleotide
tgtaaatattccatttccaa

SEQ ID NO: 1780 - DNA, 20 bp, Artificial sequence
  Synthetic oligonucleotide
agttcttattttctctagac

SEQ ID NO: 1781 - DNA, 20 bp, Artificial sequence
  Synthetic oligonucleotide
ggcacaatcacattctggta

SEQ ID NO: 1782 - DNA, 20 bp, Artificial sequence
  Synthetic oligonucleotide
cccagaactttcaattgagc

SEQ ID NO: 1783 - DNA, 20 bp, Artificial sequence
  Synthetic oligonucleotide
gttatttcattttcttccca

SEQ ID NO: 1784 - DNA, 20 bp, Artificial sequence
  Synthetic oligonucleotide
agattaacatttcctgctca

SEQ ID NO: 1785 - DNA, 20 bp, Artificial sequence
  Synthetic oligonucleotide
gttaccatttttaattctca

SEQ ID NO: 1786 - DNA, 20 bp, Artificial sequence
  Synthetic oligonucleotide
acatcaatatcacatgcctc

SEQ ID NO: 1787 - DNA, 20 bp, Artificial sequence
  Synthetic oligonucleotide
gctattctcaactcaggaat

SEQ ID NO: 1788 - DNA, 20 bp, Artificial sequence
  Synthetic oligonucleotide
ctcaaatcatcatcaggcat

SEQ ID NO: 1789 - DNA, 20 bp, Artificial sequence
  Synthetic oligonucleotide
aacctttttcttcacagcta

SEQ ID NO: 1790 - DNA, 20 bp, Artificial sequence
  Synthetic oligonucleotide
acgcaagtcattcttccagc

SEQ ID NO: 1791 - DNA, 20 bp, Artificial sequence
  Synthetic oligonucleotide
ttgtcttaaaataatctgca

SEQ ID NO: 1792 - DNA, 20 bp, Artificial sequence
  Synthetic oligonucleotide
gctcactttaactcttacca

SEQ ID NO: 1793 - DNA, 20 bp, Artificial sequence
  Synthetic oligonucleotide
gcaaacatttttacaacaac

SEQ ID NO: 1794 - DNA, 20 bp, Artificial sequence
  Synthetic oligonucleotide
acaaatattttcaactggca

SEQ ID NO: 1795 - DNA, 20 bp, Artificial sequence
  Synthetic oligonucleotide
tgtttgtaacacctaacaac

SEQ ID NO: 1796 - DNA, 20 bp, Artificial sequence
  Synthetic oligonucleotide
ccttttcattttaattcaac

SEQ ID NO: 1797 - DNA, 20 bp, Artificial sequence
  Synthetic oligonucleotide
gatacagcaattttatggct

SEQ ID NO: 1798 - DNA, 20 bp, Artificial sequence
  Synthetic oligonucleotide
gttcttattttctctagaca

SEQ ID NO: 1799 - DNA, 20 bp, Artificial sequence
  Synthetic oligonucleotide
accaagttacttaaatccta

SEQ ID NO: 1800 - DNA, 20 bp, Artificial sequence
  Synthetic oligonucleotide
ctatcaactttctaactcga

SEQ ID NO: 1801 - DNA, 20 bp, Artificial sequence
  Synthetic oligonucleotide
gctacacttttatatttcct

SEQ ID NO: 1802 - DNA, 20 bp, Artificial sequence
  Synthetic oligonucleotide
ataactattcttctttgcct

SEQ ID NO: 1803 - DNA, 20 bp, Artificial sequence
  Synthetic oligonucleotide
gctgagttcctaattcagaa

SEQ ID NO: 1804 - DNA, 20 bp, Artificial sequence
  Synthetic oligonucleotide
gacagaacccaccatgctta

SEQ ID NO: 1805 - DNA, 20 bp, Artificial sequence
  Synthetic oligonucleotide
tttgcatatttatcgattcc

SEQ ID NO: 1806 - DNA, 20 bp, Artificial sequence
  Synthetic oligonucleotide
ggaatactttctcatgggcc

SEQ ID NO: 1807 - DNA, 20 bp, Artificial sequence
  Synthetic oligonucleotide
ctgaaaataaattttgatca

SEQ ID NO: 1808 - DNA, 20 bp, Artificial sequence
  Synthetic oligonucleotide
gcatcacactatatactagc

SEQ ID NO: 1809 - DNA, 20 bp, Artificial sequence
  Synthetic oligonucleotide
tcctgaatttaatcacatca

SEQ ID NO: 1810 - DNA, 20 bp, Artificial sequence
  Synthetic oligonucleotide
ttgcttttcccatcagacca

SEQ ID NO: 1811 - DNA, 20 bp, Artificial sequence
  Synthetic oligonucleotide
atgatgtaaccatataatcc

SEQ ID NO: 1812 - DNA, 20 bp, Artificial sequence
  Synthetic oligonucleotide
atacacaccaacaacacctc

SEQ ID NO: 1813 - DNA, 20 bp, Artificial sequence
  Synthetic oligonucleotide
cagcttttatttccatacat

SEQ ID NO: 1814 - DNA, 20 bp, Artificial sequence
  Synthetic oligonucleotide
aaacactattatgagtgcca

SEQ ID NO: 1815 - DNA, 20 bp, Artificial sequence
  Synthetic oligonucleotide
tcaaatttcccttttgactt

SEQ ID NO: 1816 - DNA, 20 bp, Artificial sequence
  Synthetic oligonucleotide
gtaaatattccatttccaat

SEQ ID NO: 1817 - DNA, 20 bp, Artificial sequence
  Synthetic oligonucleotide
acctgataacctattttccc

SEQ ID NO: 1818 - DNA, 20 bp, Artificial sequence
  Synthetic oligonucleotide
cctataccatacaattctcc

SEQ ID NO: 1819 - DNA, 20 bp, Artificial sequence
  Synthetic oligonucleotide
cgtgcaggcacaattgtcaa

SEQ ID NO: 1820 - DNA, 20 bp, Artificial sequence
  Synthetic oligonucleotide
acacactcacatgcttatta

SEQ ID NO: 1821 - DNA, 20 bp, Artificial sequence
  Synthetic oligonucleotide
ccaacatttcctccacttac

SEQ ID NO: 1822 - DNA, 20 bp, Artificial sequence
  Synthetic oligonucleotide
cttgcatctaattcttgtaa

SEQ ID NO: 1823 - DNA, 20 bp, Artificial sequence
  Synthetic oligonucleotide
aacctgtaacacattttcct

SEQ ID NO: 1824 - DNA, 20 bp, Artificial sequence
  Synthetic oligonucleotide
actgactacaatcaacatac

SEQ ID NO: 1825 - DNA, 20 bp, Artificial sequence
  Synthetic oligonucleotide
gcttctcttccaaattaatc

SEQ ID NO: 1826 - DNA, 20 bp, Artificial sequence
  Synthetic oligonucleotide
gcagtgagcttatttgcaaa

SEQ ID NO: 1827 - DNA, 20 bp, Artificial sequence
  Synthetic oligonucleotide
gccaccactaatcccatggt

SEQ ID NO: 1828 - DNA, 20 bp, Artificial sequence
  Synthetic oligonucleotide
tagatgatttttatttcagt

SEQ ID NO: 1829 - DNA, 20 bp, Artificial sequence
  Synthetic oligonucleotide
tgttagcatcatcatactca

SEQ ID NO: 1830 - DNA, 20 bp, Artificial sequence
  Synthetic oligonucleotide
gtatgtataaccttttggga

SEQ ID NO: 1831 - DNA, 20 bp, Artificial sequence
  Synthetic oligonucleotide
ttagaaccaattttagacaa

SEQ ID NO: 1832 - DNA, 20 bp, Artificial sequence
  Synthetic oligonucleotide
caagtatttcctctgacctt

SEQ ID NO: 1833 - DNA, 20 bp, Artificial sequence
  Synthetic oligonucleotide
ccagaactttcaattgagct

SEQ ID NO: 1834 - DNA, 20 bp, Artificial sequence
  Synthetic oligonucleotide
tcatcttttataaagtacac

SEQ ID NO: 1835 - DNA, 20 bp, Artificial sequence
  Synthetic oligonucleotide
tgcagcagaccatcagttac

SEQ ID NO: 1836 - DNA, 20 bp, Artificial sequence
  Synthetic oligonucleotide
caccagcacattctacagcc

SEQ ID NO: 1837 - DNA, 20 bp, Artificial sequence
  Synthetic oligonucleotide
ggagatttccatttacatgc

SEQ ID NO: 1838 - DNA, 20 bp, Artificial sequence
  Synthetic oligonucleotide
acagcaatcatcctagaatt

SEQ ID NO: 1839 - DNA, 20 bp, Artificial sequence
  Synthetic oligonucleotide
agtcaccaaaatcattctca

SEQ ID NO: 1840 - DNA, 20 bp, Artificial sequence
  Synthetic oligonucleotide
ggtgtcaacaaaacttcgga

SEQ ID NO: 1841 - DNA, 20 bp, Artificial sequence
  Synthetic oligonucleotide
ttgaacaatttcattcaaca

SEQ ID NO: 1842 - DNA, 20 bp, Artificial sequence
  Synthetic oligonucleotide
gtctacacaaaatcttgcag

SEQ ID NO: 1843 - DNA, 20 bp, Artificial sequence
  Synthetic oligonucleotide
actgctctcaacatctacaa

SEQ ID NO: 1844 - DNA, 20 bp, Artificial sequence
  Synthetic oligonucleotide
cctcatttccctaatacata

SEQ ID NO: 1845 - DNA, 20 bp, Artificial sequence
  Synthetic oligonucleotide
acttcctaactcctactgta

SEQ ID NO: 1846 - DNA, 20 bp, Artificial sequence
  Synthetic oligonucleotide
ccaccatgccattctcacca

SEQ ID NO: 1847 - DNA, 20 bp, Artificial sequence
  Synthetic oligonucleotide
acctgtagtccacataccca

SEQ ID NO: 1848 - DNA, 20 bp, Artificial sequence
  Synthetic oligonucleotide
tcaataaatctttatcagca

SEQ ID NO: 1849 - DNA, 20 bp, Artificial sequence
  Synthetic oligonucleotide
gtcacaatacattttatacc

SEQ ID NO: 1850 - DNA, 20 bp, Artificial sequence
  Synthetic oligonucleotide
gaacatctaacaccttttct

SEQ ID NO: 1851 - DNA, 20 bp, Artificial sequence
  Synthetic oligonucleotide
tagtgaatacctcctttctc

SEQ ID NO: 1852 - DNA, 20 bp, Artificial sequence
  Synthetic oligonucleotide
tattcctttattttactctc

SEQ ID NO: 1853 - DNA, 20 bp, Artificial sequence
  Synthetic oligonucleotide
ccaatatcattacacacttt

SEQ ID NO: 1854 - DNA, 20 bp, Artificial sequence
  Synthetic oligonucleotide
tccaacagatcaactgctga

SEQ ID NO: 1855 - DNA, 20 bp, Artificial sequence
  Synthetic oligonucleotide
agtaccttcacatacacaga

SEQ ID NO: 1856 - DNA, 20 bp, Artificial sequence
  Synthetic oligonucleotide
tagcatcaacattaatctcc

SEQ ID NO: 1857 - DNA, 20 bp, Artificial sequence
  Synthetic oligonucleotide
gacgcaaatattatagattc

SEQ ID NO: 1858 - DNA, 20 bp, Artificial sequence
  Synthetic oligonucleotide
aggaagttctaacataggct

SEQ ID NO: 1859 - DNA, 20 bp, Artificial sequence
  Synthetic oligonucleotide
accatttttattattctaat

SEQ ID NO: 1860 - DNA, 20 bp, Artificial sequence
  Synthetic oligonucleotide
cttttgacttcacttctgac

SEQ ID NO: 1861 - DNA, 20 bp, Artificial sequence
  Synthetic oligonucleotide
tacacaccaacaacacctcc

SEQ ID NO: 1862 - DNA, 20 bp, Artificial sequence
  Synthetic oligonucleotide
caaacatttttacaacaaca

SEQ ID NO: 1863 - DNA, 20 bp, Artificial sequence
  Synthetic oligonucleotide
atatcattacacactttcct

SEQ ID NO: 1864 - DNA, 20 bp, Artificial sequence
  Synthetic oligonucleotide
gcaagtcattcttccagctc

SEQ ID NO: 1865 - DNA, 20 bp, Artificial sequence
  Synthetic oligonucleotide
ccaccatgcttatctgagca

SEQ ID NO: 1866 - DNA, 20 bp, Artificial sequence
  Synthetic oligonucleotide
ccactgttacatatatttct

SEQ ID NO: 1867 - DNA, 20 bp, Artificial sequence
  Synthetic oligonucleotide
cctgataacctattttccca

SEQ ID NO: 1868 - DNA, 20 bp, Artificial sequence
  Synthetic oligonucleotide
tcctgctaaaacctacacca

SEQ ID NO: 1869 - DNA, 20 bp, Artificial sequence
  Synthetic oligonucleotide
tcacaatacattttatacca

SEQ ID NO: 1870 - DNA, 20 bp, Artificial sequence
  Synthetic oligonucleotide
cagtagttcctaaatcatca

SEQ ID NO: 1871 - DNA, 20 bp, Artificial sequence
  Synthetic oligonucleotide
gaaatgagtttccattgcta

SEQ ID NO: 1872 - DNA, 20 bp, Artificial sequence
  Synthetic oligonucleotide
gcaaatattatagattccaa

SEQ ID NO: 1873 - DNA, 20 bp, Artificial sequence
  Synthetic oligonucleotide
cctgaatttaatcacatcat

SEQ ID NO: 1874 - DNA, 20 bp, Artificial sequence
  Synthetic oligonucleotide
ctggcaaacatttatgttca

SEQ ID NO: 1875 - DNA, 20 bp, Artificial sequence
  Synthetic oligonucleotide
gcatatagtttcaatacttt

SEQ ID NO: 1876 - DNA, 20 bp, Artificial sequence
  Synthetic oligonucleotide
catcttttataaagtacaca

SEQ ID NO: 1877 - DNA, 20 bp, Artificial sequence
  Synthetic oligonucleotide
taccagacattttaaaggca

SEQ ID NO: 1878 - DNA, 20 bp, Artificial sequence
  Synthetic oligonucleotide
aacatctaacaccttttcta

SEQ ID NO: 1879 - DNA, 20 bp, Artificial sequence
  Synthetic oligonucleotide
ctgtactgaatcttaagaac

SEQ ID NO: 1880 - DNA, 20 bp, Artificial sequence
  Synthetic oligonucleotide
ttgatcattattccataaca

SEQ ID NO: 1881 - DNA, 20 bp, Artificial sequence
  Synthetic oligonucleotide
accagcacattctacagcca

SEQ ID NO: 1882 - DNA, 20 bp, Artificial sequence
  Synthetic oligonucleotide
cttttcattttaattcaacc

SEQ ID NO: 1883 - DNA, 20 bp, Artificial sequence
  Synthetic oligonucleotide
acttttatatttcctagctg

SEQ ID NO: 1884 - DNA, 20 bp, Artificial sequence
  Synthetic oligonucleotide
catcacactatatactagca

SEQ ID NO: 1885 - DNA, 20 bp, Artificial sequence
  Synthetic oligonucleotide
ccatttttaattctcatctc

SEQ ID NO: 1886 - DNA, 20 bp, Artificial sequence
  Synthetic oligonucleotide
acaagcatttttatcaacat

SEQ ID NO: 1887 - DNA, 20 bp, Artificial sequence
  Synthetic oligonucleotide
caatcatcctagaattgctt

SEQ ID NO: 1888 - DNA, 20 bp, Artificial sequence
  Synthetic oligonucleotide
gtttgtaacacctaacaacc

SEQ ID NO: 1889 - DNA, 20 bp, Artificial sequence
  Synthetic oligonucleotide
agtgaatacctcctttctca

SEQ ID NO: 1890 - DNA, 20 bp, Artificial sequence
  Synthetic oligonucleotide
agatgatttttatttcagta

SEQ ID NO: 1891 - DNA, 20 bp, Artificial sequence
  Synthetic oligonucleotide
tttttcttcacagctatctt

SEQ ID NO: 1892 - DNA, 20 bp, Artificial sequence
  Synthetic oligonucleotide
aatgtatttaataccagcga

SEQ ID NO: 1893 - DNA, 20 bp, Artificial sequence
  Synthetic oligonucleotide
gcatctccaaaccatacaat

SEQ ID NO: 1894 - DNA, 20 bp, Artificial sequence
  Synthetic oligonucleotide
gctttgtgagaaatcagtta

SEQ ID NO: 1895 - DNA, 20 bp, Artificial sequence
  Synthetic oligonucleotide
tcctaactcctactgtacac

SEQ ID NO: 1896 - DNA, 20 bp, Artificial sequence
  Synthetic oligonucleotide
tctagtaattcatttttctc

SEQ ID NO: 1897 - DNA, 20 bp, Artificial sequence
  Synthetic oligonucleotide
ttcattagctataattcctt

SEQ ID NO: 1898 - DNA, 20 bp, Artificial sequence
  Synthetic oligonucleotide
atcaactttctaactcgaaa

SEQ ID NO: 1899 - DNA, 20 bp, Artificial sequence
  Synthetic oligonucleotide
agaccagccccacctcctca

SEQ ID NO: 1900 - DNA, 20 bp, Artificial sequence
  Synthetic oligonucleotide
gttatattttctagctgatt

SEQ ID NO: 1901 - DNA, 20 bp, Artificial sequence
  Synthetic oligonucleotide
tgatgtaaccatataatccc

SEQ ID NO: 1902 - DNA, 20 bp, Artificial sequence
  Synthetic oligonucleotide
acctgtaacacattttccta

SEQ ID NO: 1903 - DNA, 20 bp, Artificial sequence
  Synthetic oligonucleotide
agttacttaaatcctatgtt

SEQ ID NO: 1904 - DNA, 20 bp, Artificial sequence
  Synthetic oligonucleotide
tttcattttcttcccacaac

SEQ ID NO: 1905 - DNA, 20 bp, Artificial sequence
  Synthetic oligonucleotide
tcacatgcttattaataccc

SEQ ID NO: 1906 - DNA, 20 bp, Artificial sequence
  Synthetic oligonucleotide
cctgtagtccacatacccat

SEQ ID NO: 1907 - DNA, 20 bp, Artificial sequence
  Synthetic oligonucleotide
gcttatttgcaaaatactga

SEQ ID NO: 1908 - DNA, 20 bp, Artificial sequence
  Synthetic oligonucleotide
gtttgcctcatatttggacc

SEQ ID NO: 1909 - DNA, 20 bp, Artificial sequence
  Synthetic oligonucleotide
tgctctcaacatctacaaaa

SEQ ID NO: 1910 - DNA, 20 bp, Artificial sequence
  Synthetic oligonucleotide
tcctttattttactctcaga

SEQ ID NO: 1911 - DNA, 20 bp, Artificial sequence
  Synthetic oligonucleotide
tcacagtaccataattcata

SEQ ID NO: 1912 - DNA, 20 bp, Artificial sequence
  Synthetic oligonucleotide
cacagtgaacttctttccgt

SEQ ID NO: 1913 - DNA, 20 bp, Artificial sequence
  Synthetic oligonucleotide
tgactacaatcaacatacca

SEQ ID NO: 1914 - DNA, 20 bp, Artificial sequence
  Synthetic oligonucleotide
gttagcatcatcatactcaa

SEQ ID NO: 1915 - DNA, 20 bp, Artificial sequence
  Synthetic oligonucleotide
ttccatttccaatcagaatt

SEQ ID NO: 1916 - DNA, 20 bp, Artificial sequence
  Synthetic oligonucleotide
catttcctccacttaccaca

SEQ ID NO: 1917 - DNA, 20 bp, Artificial sequence
  Synthetic oligonucleotide
caaatattttcaactggcac

SEQ ID NO: 1918 - DNA, 20 bp, Artificial sequence
  Synthetic oligonucleotide
tacacccatcataaattcat

SEQ ID NO: 1919 - DNA, 20 bp, Artificial sequence
  Synthetic oligonucleotide
ctcttaccatactatgggcc

SEQ ID NO: 1920 - DNA, 20 bp, Artificial sequence
  Synthetic oligonucleotide
tgatggccatttaaatcttg

SEQ ID NO: 1921 - DNA, 20 bp, Artificial sequence
  Synthetic oligonucleotide
agcatcaacattaatctcct

SEQ ID NO: 1922 - DNA, 20 bp, Artificial sequence
  Synthetic oligonucleotide
tggcttttttcattagcata

SEQ ID NO: 1923 - DNA, 20 bp, Artificial sequence
  Synthetic oligonucleotide
ctgtttttatcctcacagaa

SEQ ID NO: 1924 - DNA, 20 bp, Artificial sequence
  Synthetic oligonucleotide
ggcactctcctttctccctc

SEQ ID NO: 1925 - DNA, 20 bp, Artificial sequence
  Synthetic oligonucleotide
ccatacaattctccccattt

SEQ ID NO: 1926 - DNA, 20 bp, Artificial sequence
  Synthetic oligonucleotide
agtatgtatcttacacatca

SEQ ID NO: 1927 - DNA, 20 bp, Artificial sequence
  Synthetic oligonucleotide
gacaatgattcacacggtct

SEQ ID NO: 1928 - DNA, 20 bp, Artificial sequence
  Synthetic oligonucleotide
tctcttccaaattaatcggt

SEQ ID NO: 1929 - DNA, 20 bp, Artificial sequence
  Synthetic oligonucleotide
gtaccttcacatacacagac

SEQ ID NO: 1930 - DNA, 20 bp, Artificial sequence
  Synthetic oligonucleotide
atcacatgcctctaagttta

SEQ ID NO: 1931 - DNA, 20 bp, Artificial sequence
  Synthetic oligonucleotide
atcaagtgatcatttaagct

SEQ ID NO: 1932 - DNA, 20 bp, Artificial sequence
  Synthetic oligonucleotide
cagaactttcaattgagctt

SEQ ID NO: 1933 - DNA, 20 bp, Artificial sequence
  Synthetic oligonucleotide
agcttttatttccatacata

SEQ ID NO: 1934 - DNA, 20 bp, Artificial sequence
  Synthetic oligonucleotide
gaggtaccaatctcttggtt

SEQ ID NO: 1935 - DNA, 20 bp, Artificial sequence
  Synthetic oligonucleotide
gagtaatttccttccaggga

SEQ ID NO: 1936 - DNA, 20 bp, Artificial sequence
  Synthetic oligonucleotide
gcttagtaaaatatatatct

SEQ ID NO: 1937 - DNA, 20 bp, Artificial sequence
  Synthetic oligonucleotide
cctctatttttcaatttatt

SEQ ID NO: 1938 - DNA, 20 bp, Artificial sequence
  Synthetic oligonucleotide
ttttcattagcataacttca

SEQ ID NO: 1939 - DNA, 20 bp, Artificial sequence
  Synthetic oligonucleotide
ttcattttcttcccacaaca

SEQ ID NO: 1940 - DNA, 20 bp, Artificial sequence
  Synthetic oligonucleotide
gcctaagattccttagtggc

SEQ ID NO: 1941 - DNA, 20 bp, Artificial sequence
  Synthetic oligonucleotide
gactacaatcaacataccac

SEQ ID NO: 1942 - DNA, 20 bp, Artificial sequence
  Synthetic oligonucleotide
ggaccatgacttaatgctgt

SEQ ID NO: 1943 - DNA, 20 bp, Artificial sequence
  Synthetic oligonucleotide
acaaatgttattcactgcaa

SEQ ID NO: 1944 - DNA, 20 bp, Artificial sequence
  Synthetic oligonucleotide
actatgtatcttcatcacaa

SEQ ID NO: 1945 - DNA, 20 bp, Artificial sequence
  Synthetic oligonucleotide
tcacacggtctttcttggta

SEQ ID NO: 1946 - DNA, 20 bp, Artificial sequence
  Synthetic oligonucleotide
acaccaacaacacctcctgc

SEQ ID NO: 1947 - DNA, 20 bp, Artificial sequence
  Synthetic oligonucleotide
agttgttttaaatattgcca

SEQ ID NO: 1948 - DNA, 20 bp, Artificial sequence
  Synthetic oligonucleotide
ataacctattttcccactca

SEQ ID NO: 1949 - DNA, 20 bp, Artificial sequence
  Synthetic oligonucleotide
gtacacctcattcatccctc

SEQ ID NO: 1950 - DNA, 20 bp, Artificial sequence
  Synthetic oligonucleotide
ggtatgacaattttaattca

SEQ ID NO: 1951 - DNA, 20 bp, Artificial sequence
  Synthetic oligonucleotide
ctttattttactctcagagt

SEQ ID NO: 1952 - DNA, 20 bp, Artificial sequence
  Synthetic oligonucleotide
gctctcaacatctacaaaat

SEQ ID NO: 1953 - DNA, 20 bp, Artificial sequence
  Synthetic oligonucleotide
atcacactatatactagcat

SEQ ID NO: 1954 - DNA, 20 bp, Artificial sequence
  Synthetic oligonucleotide
acagagaatttcattagata

SEQ ID NO: 1955 - DNA, 20 bp, Artificial sequence
  Synthetic oligonucleotide
tcctatgtttctacatgaca

SEQ ID NO: 1956 - DNA, 20 bp, Artificial sequence
  Synthetic oligonucleotide
cagacacacatgcagagcct

SEQ ID NO: 1957 - DNA, 20 bp, Artificial sequence
  Synthetic oligonucleotide
agccagagttcacttaagat

SEQ ID NO: 1958 - DNA, 20 bp, Artificial sequence
  Synthetic oligonucleotide
tttgacttcacttctgaccc

SEQ ID NO: 1959 - DNA, 20 bp, Artificial sequence
  Synthetic oligonucleotide
acaatacattttataccagc

SEQ ID NO: 1960 - DNA, 20 bp, Artificial sequence
  Synthetic oligonucleotide
acaacaacactgtatagcta

SEQ ID NO: 1961 - DNA, 20 bp, Artificial sequence
  Synthetic oligonucleotide
ccagcacattctacagccac

SEQ ID NO: 1962 - DNA, 20 bp, Artificial sequence
  Synthetic oligonucleotide
cactgttacatatatttctt

SEQ ID NO: 1963 - DNA, 20 bp, Artificial sequence
  Synthetic oligonucleotide
gatgtaaccatataatccca

SEQ ID NO: 1964 - DNA, 20 bp, Artificial sequence
  Synthetic oligonucleotide
tcattcttccagctctcctt

SEQ ID NO: 1965 - DNA, 20 bp, Artificial sequence
  Synthetic oligonucleotide
cagatataaaatatacacta

SEQ ID NO: 1966 - DNA, 20 bp, Artificial sequence
  Synthetic oligonucleotide
acatctaacaccttttctac

SEQ ID NO: 1967 - DNA, 20 bp, Artificial sequence
  Synthetic oligonucleotide
accagacattttaaaggcag

SEQ ID NO: 1968 - DNA, 20 bp, Artificial sequence
  Synthetic oligonucleotide
gtaacacattttcctagttg

SEQ ID NO: 1969 - DNA, 20 bp, Artificial sequence
  Synthetic oligonucleotide
aattcatttttctcatctca

SEQ ID NO: 1970 - DNA, 20 bp, Artificial sequence
  Synthetic oligonucleotide
tccaaattcagaaatgactt

SEQ ID NO: 1971 - DNA, 20 bp, Artificial sequence
  Synthetic oligonucleotide
ggcagagtttctaccgggca

SEQ ID NO: 1972 - DNA, 20 bp, Artificial sequence
  Synthetic oligonucleotide
ctgaatttaatcacatcata

SEQ ID NO: 1973 - DNA, 20 bp, Artificial sequence
  Synthetic oligonucleotide
gcccatagtcttgaactcct

SEQ ID NO: 1974 - DNA, 20 bp, Artificial sequence
  Synthetic oligonucleotide
aatcagttttttcactcact

SEQ ID NO: 1975 - DNA, 20 bp, Artificial sequence
  Synthetic oligonucleotide
agtaatttccttccagggat

SEQ ID NO: 1976 - DNA, 20 bp, Artificial sequence
  Synthetic oligonucleotide
gcttagttcatgaaatctaa

SEQ ID NO: 1977 - DNA, 20 bp, Artificial sequence
  Synthetic oligonucleotide
agaaggacttctcattggac

SEQ ID NO: 1978 - DNA, 20 bp, Artificial sequence
  Synthetic oligonucleotide
cgaggcttcatcaggaagaa

SEQ ID NO: 1979 - DNA, 20 bp, Artificial sequence
  Synthetic oligonucleotide
acttcagatttcattcagat

SEQ ID NO: 1980 - DNA, 20 bp, Artificial sequence
  Synthetic oligonucleotide
gtttatggtcacccatatta

SEQ ID NO: 1981 - DNA, 20 bp, Artificial sequence
  Synthetic oligonucleotide
acacccatcataaattcata

SEQ ID NO: 1982 - DNA, 20 bp, Artificial sequence
  Synthetic oligonucleotide
ctaaaacctacaccacatca

SEQ ID NO: 1983 - DNA, 20 bp, Artificial sequence
  Synthetic oligonucleotide
acagtgaacttctttccgtt

SEQ ID NO: 1984 - DNA, 20 bp, Artificial sequence
  Synthetic oligonucleotide
tcaacattaatctcctgagt

SEQ ID NO: 1985 - DNA, 20 bp, Artificial sequence
  Synthetic oligonucleotide
tggccatttaaatcttgata

SEQ ID NO: 1986 - DNA, 20 bp, Artificial sequence
  Synthetic oligonucleotide
atagtattttccattttgct

SEQ ID NO: 1987 - DNA, 20 bp, Artificial sequence
  Synthetic oligonucleotide
gcttttatttccatacatat

SEQ ID NO: 1988 - DNA, 20 bp, Artificial sequence
  Synthetic oligonucleotide
gtagcatttccaccatctac

SEQ ID NO: 1989 - DNA, 20 bp, Artificial sequence
  Synthetic oligonucleotide
tttcattttaattcaaccta

SEQ ID NO: 1990 - DNA, 20 bp, Artificial sequence
  Synthetic oligonucleotide
ggcaacctcaagctgtgcca

SEQ ID NO: 1991 - DNA, 20 bp, Artificial sequence
  Synthetic oligonucleotide
ctcttccaaattaatcggtt

SEQ ID NO: 1992 - DNA, 20 bp, Artificial sequence
  Synthetic oligonucleotide
tatcattacacactttccta

SEQ ID NO: 1993 - DNA, 20 bp, Artificial sequence
  Synthetic oligonucleotide
caagcatttttatcaacatc

SEQ ID NO: 1994 - DNA, 20 bp, Artificial sequence
  Synthetic oligonucleotide
tacctcctttctcaacagca

SEQ ID NO: 1995 - DNA, 20 bp, Artificial sequence
  Synthetic oligonucleotide
tcctccacttaccacattca

SEQ ID NO: 1996 - DNA, 20 bp, Artificial sequence
  Synthetic oligonucleotide
acatgaactctataatatcc

SEQ ID NO: 1997 - DNA, 20 bp, Artificial sequence
  Synthetic oligonucleotide
ttgtaacacctaacaaccca

SEQ ID NO: 1998 - DNA, 20 bp, Artificial sequence
  Synthetic oligonucleotide
ataccatctatcatctgagc

SEQ ID NO: 1999 - DNA, 20 bp, Artificial sequence
  Synthetic oligonucleotide
ttaacaaattttccagatga

SEQ ID NO: 2000 - DNA, 20 bp, Artificial sequence
  Synthetic oligonucleotide
cttcacagctatcttctcat

SEQ ID NO: 2001 - DNA, 20 bp, Artificial sequence
  Synthetic oligonucleotide
acatgcttattaatacccca

SEQ ID NO: 2002 - DNA, 20 bp, Artificial sequence
  Synthetic oligonucleotide
gctacactcaccactatcaa

SEQ ID NO: 2003 - DNA, 20 bp, Artificial sequence
  Synthetic oligonucleotide
acttaattcaatgaaggcta

SEQ ID NO: 2004 - DNA, 20 bp, Artificial sequence
  Synthetic oligonucleotide
caagtgatcatttaagctta

SEQ ID NO: 2005 - DNA, 20 bp, Artificial sequence
  Synthetic oligonucleotide
gtatatctcaattcagacac

SEQ ID NO: 2006 - DNA, 20 bp, Artificial sequence
  Synthetic oligonucleotide
gtagttcctaaatcatcacc

SEQ ID NO: 2007 - DNA, 20 bp, Artificial sequence
  Synthetic oligonucleotide
gtctttgttcttactagaat

SEQ ID NO: 2008 - DNA, 20 bp, Artificial sequence
  Synthetic oligonucleotide
cagcagtaagacttcagtca

SEQ ID NO: 2009 - DNA, 20 bp, Artificial sequence
  Synthetic oligonucleotide
cctctcaatctttctttttc

SEQ ID NO: 2010 - DNA, 20 bp, Artificial sequence
  Synthetic oligonucleotide
acagcatttccttctaacat

SEQ ID NO: 2011 - DNA, 20 bp, Artificial sequence
  Synthetic oligonucleotide
aatggctgaatttattccct

SEQ ID NO: 2012 - DNA, 20 bp, Artificial sequence
  Synthetic oligonucleotide
tgcaaaccatacaatagagc

SEQ ID NO: 2013 - DNA, 20 bp, Artificial sequence
  Synthetic oligonucleotide
atgtatttaataccagcgaa

SEQ ID NO: 2014 - DNA, 20 bp, Artificial sequence
  Synthetic oligonucleotide
acctacaccacatcagcgca

SEQ ID NO: 2015 - DNA, 20 bp, Artificial sequence
  Synthetic oligonucleotide
caggaagaatacctgtggct

SEQ ID NO: 2016 - DNA, 20 bp, Artificial sequence
  Synthetic oligonucleotide
gttacacatatttaaccaca

SEQ ID NO: 2017 - DNA, 20 bp, Artificial sequence
  Synthetic oligonucleotide
ttcaagttaaactatccata

SEQ ID NO: 2018 - DNA, 20 bp, Artificial sequence
  Synthetic oligonucleotide
ctgaaagttctttctttcta

SEQ ID NO: 2019 - DNA, 20 bp, Artificial sequence
  Synthetic oligonucleotide
acctcattcatccctcggca

SEQ ID NO: 2020 - DNA, 20 bp, Artificial sequence
  Synthetic oligonucleotide
gggtttttccacatatctga

SEQ ID NO: 2021 - DNA, 20 bp, Artificial sequence
  Synthetic oligonucleotide
tccaaaccatacaagagcac

SEQ ID NO: 2022 - DNA, 20 bp, Artificial sequence
  Synthetic oligonucleotide
tcaacatctacaaaatgctt

SEQ ID NO: 2023 - DNA, 20 bp, Artificial sequence
  Synthetic oligonucleotide
ttcattttaattcaacctac

SEQ ID NO: 2024 - DNA, 20 bp, Artificial sequence
  Synthetic oligonucleotide
tcacagctatcttctcatca

SEQ ID NO: 2025 - DNA, 20 bp, Artificial sequence
  Synthetic oligonucleotide
aatacattttataccagctc

SEQ ID NO: 2026 - DNA, 20 bp, Artificial sequence
  Synthetic oligonucleotide
tcattttcttcccacaacat

SEQ ID NO: 2027 - DNA, 20 bp, Artificial sequence
  Synthetic oligonucleotide
tgtatcttcatcacaatcta

SEQ ID NO: 2028 - DNA, 20 bp, Artificial sequence
  Synthetic oligonucleotide
gatttattttttccttccac

SEQ ID NO: 2029 - DNA, 20 bp, Artificial sequence
  Synthetic oligonucleotide
agttgactttctaaattacc

SEQ ID NO: 2030 - DNA, 20 bp, Artificial sequence
  Synthetic oligonucleotide
gtaaccatataatcccaaca

SEQ ID NO: 2031 - DNA, 20 bp, Artificial sequence
  Synthetic oligonucleotide
ctttctattttcttgagaga

SEQ ID NO: 2032 - DNA, 20 bp, Artificial sequence
  Synthetic oligonucleotide
aagcatttttatcaacatct

SEQ ID NO: 2033 - DNA, 20 bp, Artificial sequence
  Synthetic oligonucleotide
tggctgaatttattccctcc

SEQ ID NO: 2034 - DNA, 20 bp, Artificial sequence
  Synthetic oligonucleotide
acttcactataataacccta

SEQ ID NO: 2035 - DNA, 20 bp, Artificial sequence
  Synthetic oligonucleotide
gttgttttaaatattgccat

SEQ ID NO: 2036 - DNA, 20 bp, Artificial sequence
  Synthetic oligonucleotide
taagattgaaattcagatca

SEQ ID NO: 2037 - DNA, 20 bp, Artificial sequence
  Synthetic oligonucleotide
atatgggtcccattaaggct

SEQ ID NO: 2038 - DNA, 20 bp, Artificial sequence
  Synthetic oligonucleotide
catgggtattttccttgact

SEQ ID NO: 2039 - DNA, 20 bp, Artificial sequence
  Synthetic oligonucleotide
actacaatcaacataccaca

SEQ ID NO: 2040 - DNA, 20 bp, Artificial sequence
  Synthetic oligonucleotide
ccatcataaattcatacaga

SEQ ID NO: 2041 - DNA, 20 bp, Artificial sequence
  Synthetic oligonucleotide
actgttacatatatttcttc

SEQ ID NO: 2042 - DNA, 20 bp, Artificial sequence
  Synthetic oligonucleotide
gcagaagtttatccatagcc

SEQ ID NO: 2043 - DNA, 20 bp, Artificial sequence
  Synthetic oligonucleotide
atatacatttacatgtacct

SEQ ID NO: 2044 - DNA, 20 bp, Artificial sequence
  Synthetic oligonucleotide
actgcaaataatattaggca

SEQ ID NO: 2045 - DNA, 20 bp, Artificial sequence
  Synthetic oligonucleotide
cacatcataaaacaattttc

SEQ ID NO: 2046 - DNA, 20 bp, Artificial sequence
  Synthetic oligonucleotide
tcagttttttcactcactac

SEQ ID NO: 2047 - DNA, 20 bp, Artificial sequence
  Synthetic oligonucleotide
cctgtcacttaccatcccaa

SEQ ID NO: 2048 - DNA, 20 bp, Artificial sequence
  Synthetic oligonucleotide
ccaacatccaactaaccaat

SEQ ID NO: 2049 - DNA, 20 bp, Artificial sequence
  Synthetic oligonucleotide
ctgtatagctacatttttcc

SEQ ID NO: 2050 - DNA, 20 bp, Artificial sequence
  Synthetic oligonucleotide
gcttagaagtcatttagtcc

SEQ ID NO: 2051 - DNA, 20 bp, Artificial sequence
  Synthetic oligonucleotide
ttgatgctcatccatactta

SEQ ID NO: 2052 - DNA, 20 bp, Artificial sequence
  Synthetic oligonucleotide
tagtattttccattttgcta

SEQ ID NO: 2053 - DNA, 20 bp, Artificial sequence
  Synthetic oligonucleotide
cctgtaggttatttttgcct

SEQ ID NO: 2054 - DNA, 20 bp, Artificial sequence
  Synthetic oligonucleotide
ccagctctccttcaggagaa

SEQ ID NO: 2055 - DNA, 20 bp, Artificial sequence
  Synthetic oligonucleotide
actctataatatccatctga

SEQ ID NO: 2056 - DNA, 20 bp, Artificial sequence
  Synthetic oligonucleotide
gcatatgtacataatttaat

SEQ ID NO: 2057 - DNA, 20 bp, Artificial sequence
  Synthetic oligonucleotide
ctaacaccttttctacaaat

SEQ ID NO: 2058 - DNA, 20 bp, Artificial sequence
  Synthetic oligonucleotide
ccagacattttaaaggcagt

SEQ ID NO: 2059 - DNA, 20 bp, Artificial sequence
  Synthetic oligonucleotide
tctcaatctttctttttctc

SEQ ID NO: 2060 - DNA, 20 bp, Artificial sequence
  Synthetic oligonucleotide
accaacaacacctcctgcca

SEQ ID NO: 2061 - DNA, 20 bp, Artificial sequence
  Synthetic oligonucleotide
ggtcagacatataataatct

SEQ ID NO: 2062 - DNA, 20 bp, Artificial sequence
  Synthetic oligonucleotide
cctaagattccttagtggcc

SEQ ID NO: 2063 - DNA, 20 bp, Artificial sequence
  Synthetic oligonucleotide
gacaaggcttttcctccaat

SEQ ID NO: 2064 - DNA, 20 bp, Artificial sequence
  Synthetic oligonucleotide
ctgttggccatctctcaccc

SEQ ID NO: 2065 - DNA, 20 bp, Artificial sequence
  Synthetic oligonucleotide
gcacagctcctacactctga

SEQ ID NO: 2066 - DNA, 20 bp, Artificial sequence
  Synthetic oligonucleotide
taccatctatcatctgagct

SEQ ID NO: 2067 - DNA, 20 bp, Artificial sequence
  Synthetic oligonucleotide
cagacactaaattttcatca

SEQ ID NO: 2068 - DNA, 20 bp, Artificial sequence
  Synthetic oligonucleotide
tgtaacacctaacaacccaa

SEQ ID NO: 2069 - DNA, 20 bp, Artificial sequence
  Synthetic oligonucleotide
tggacttaagcaattaagcc

SEQ ID NO: 2070 - DNA, 20 bp, Artificial sequence
  Synthetic oligonucleotide
gccaggccatttccttccac

SEQ ID NO: 2071 - DNA, 20 bp, Artificial sequence
  Synthetic oligonucleotide
tgcagttgatttcagagcat

SEQ ID NO: 2072 - DNA, 20 bp, Artificial sequence
  Synthetic oligonucleotide
ggcacaggatcttttagaac

SEQ ID NO: 2073 - DNA, 20 bp, Artificial sequence
  Synthetic oligonucleotide
cagtcattcacatgcagggc

SEQ ID NO: 2074 - DNA, 20 bp, Artificial sequence
  Synthetic oligonucleotide
acgctgtttcctacctgcac

SEQ ID NO: 2075 - DNA, 20 bp, Artificial sequence
  Synthetic oligonucleotide
ctatttttcaatttattcct

SEQ ID NO: 2076 - DNA, 20 bp, Artificial sequence
  Synthetic oligonucleotide
gagtccagtcacaataacct

SEQ ID NO: 2077 - DNA, 20 bp, Artificial sequence
  Synthetic oligonucleotide
tggtcacccatattactcat

SEQ ID NO: 2078 - DNA, 20 bp, Artificial sequence
  Synthetic oligonucleotide
acatatacaaataatggagt

SEQ ID NO: 2079 - DNA, 20 bp, Artificial sequence
  Synthetic oligonucleotide
gtatgacaattttaattcat

SEQ ID NO: 2080 - DNA, 20 bp, Artificial sequence
  Synthetic oligonucleotide
ttggatgaatgatcttatta

SEQ ID NO: 2081 - DNA, 20 bp, Artificial sequence
  Synthetic oligonucleotide
acttaccacattcaataccc

SEQ ID NO: 2082 - DNA, 20 bp, Artificial sequence
  Synthetic oligonucleotide
taacctattttcccactcat

SEQ ID NO: 2083 - DNA, 20 bp, Artificial sequence
  Synthetic oligonucleotide
tagacggattttcttcggac

SEQ ID NO: 2084 - DNA, 20 bp, Artificial sequence
  Synthetic oligonucleotide
tggatgtgactcacttacct

SEQ ID NO: 2085 - DNA, 20 bp, Artificial sequence
  Synthetic oligonucleotide
ttgcatgctatcagtagctc

SEQ ID NO: 2086 - DNA, 20 bp, Artificial sequence
  Synthetic oligonucleotide
gcccagcatattcaacagac

SEQ ID NO: 2087 - DNA, 20 bp, Artificial sequence
  Synthetic oligonucleotide
gccaagcacatcacgacacc

SEQ ID NO: 2088 - DNA, 20 bp, Artificial sequence
  Synthetic oligonucleotide
tagttcctaaatcatcacca

SEQ ID NO: 2089 - DNA, 20 bp, Artificial sequence
  Synthetic oligonucleotide
gccatttaaatcttgataaa

SEQ ID NO: 2090 - DNA, 20 bp, Artificial sequence
  Synthetic oligonucleotide
ttctaaaatattacatagca

SEQ ID NO: 2091 - DNA, 20 bp, Artificial sequence
  Synthetic oligonucleotide
gcttatttttcagaatacga

SEQ ID NO: 2092 - DNA, 20 bp, Artificial sequence
  Synthetic oligonucleotide
ttacatatatttcttccgtt

SEQ ID NO: 2093 - DNA, 20 bp, Artificial sequence
  Synthetic oligonucleotide
acaagagcacttccaaacca

SEQ ID NO: 2094 - DNA, 20 bp, Artificial sequence
  Synthetic oligonucleotide
aagcataatcatcttcaccc

SEQ ID NO: 2095 - DNA, 20 bp, Artificial sequence
  Synthetic oligonucleotide
cagaagtttatccatagcct

SEQ ID NO: 2096 - DNA, 20 bp, Artificial sequence
  Synthetic oligonucleotide
ctgagtagtttaaccattca

SEQ ID NO: 2097 - DNA, 20 bp, Artificial sequence
  Synthetic oligonucleotide
gcaagggtttccagaagctc

SEQ ID NO: 2098 - DNA, 20 bp, Artificial sequence
  Synthetic oligonucleotide
agtccagtcacaataaccta

SEQ ID NO: 2099 - DNA, 20 bp, Artificial sequence
  Synthetic oligonucleotide
gtaagcctttttgaatggta

SEQ ID NO: 2100 - DNA, 20 bp, Artificial sequence
  Synthetic oligonucleotide
tctctctttttcctgtgggc

SEQ ID NO: 2101 - DNA, 20 bp, Artificial sequence
  Synthetic oligonucleotide
atacattttataccagctca

SEQ ID NO: 2102 - DNA, 20 bp, Artificial sequence
  Synthetic oligonucleotide
tcagtgatacaccaaccacc

SEQ ID NO: 2103 - DNA, 20 bp, Artificial sequence
  Synthetic oligonucleotide
acagaagcaattcattccct

SEQ ID NO: 2104 - DNA, 20 bp, Artificial sequence
  Synthetic oligonucleotide
agttttttcactcactacat

SEQ ID NO: 2105 - DNA, 20 bp, Artificial sequence
  Synthetic oligonucleotide
tgtcacagccttccttccac

SEQ ID NO: 2106 - DNA, 20 bp, Artificial sequence
  Synthetic oligonucleotide
ttgaaattcagatcatgcta

SEQ ID NO: 2107 - DNA, 20 bp, Artificial sequence
  Synthetic oligonucleotide
ggccaacaacttcatgagca

SEQ ID NO: 2108 - DNA, 20 bp, Artificial sequence
  Synthetic oligonucleotide
ggcttcctcatcttcatcct

SEQ ID NO: 2109 - DNA, 20 bp, Artificial sequence
  Synthetic oligonucleotide
accattctttttaatttcct

SEQ ID NO: 2110 - DNA, 20 bp, Artificial sequence
  Synthetic oligonucleotide
acatcataaaacaattttcc

SEQ ID NO: 2111 - DNA, 20 bp, Artificial sequence
  Synthetic oligonucleotide
gctgaatttattccctccct

SEQ ID NO: 2112 - DNA, 20 bp, Artificial sequence
  Synthetic oligonucleotide
gtatagctacatttttccca

SEQ ID NO: 2113 - DNA, 20 bp, Artificial sequence
  Synthetic oligonucleotide
acctattttcccactcatca

SEQ ID NO: 2114 - DNA, 20 bp, Artificial sequence
  Synthetic oligonucleotide
ctggttctttctccttcccc

SEQ ID NO: 2115 - DNA, 20 bp, Artificial sequence
  Synthetic oligonucleotide
tagagattcatcatattgcc

SEQ ID NO: 2116 - DNA, 20 bp, Artificial sequence
  Synthetic oligonucleotide
ccaacaacacctcctgccac

SEQ ID NO: 2117 - DNA, 20 bp, Artificial sequence
  Synthetic oligonucleotide
cagttcataaacctggacaa

SEQ ID NO: 2118 - DNA, 20 bp, Artificial sequence
  Synthetic oligonucleotide
accatctatcatctgagctc

SEQ ID NO: 2119 - DNA, 20 bp, Artificial sequence
  Synthetic oligonucleotide
ggcagcagcatataccgagt

SEQ ID NO: 2120 - DNA, 20 bp, Artificial sequence
  Synthetic oligonucleotide
ttcttcccacaacatttcca

SEQ ID NO: 2121 - DNA, 20 bp, Artificial sequence
  Synthetic oligonucleotide
cgtataccatttccaaccac

SEQ ID NO: 2122 - DNA, 20 bp, Artificial sequence
  Synthetic oligonucleotide
gtatgccatatttattagca

SEQ ID NO: 2123 - DNA, 20 bp, Artificial sequence
  Synthetic oligonucleotide
ccagcatattcaacagactt

SEQ ID NO: 2124 - DNA, 20 bp, Artificial sequence
  Synthetic oligonucleotide
tgtgttgaattacccactcc

SEQ ID NO: 2125 - DNA, 20 bp, Artificial sequence
  Synthetic oligonucleotide
cgggaaatacttcacagagc

SEQ ID NO: 2126 - DNA, 20 bp, Artificial sequence
  Synthetic oligonucleotide
tgcatatctaaaattatcaa

SEQ ID NO: 2127 - DNA, 20 bp, Artificial sequence
  Synthetic oligonucleotide
gtagcaaacattattagact

SEQ ID NO: 2128 - DNA, 20 bp, Artificial sequence
  Synthetic oligonucleotide
aagttaaactatccataggc

SEQ ID NO: 2129 - DNA, 20 bp, Artificial sequence
  Synthetic oligonucleotide
atttattttttccttccacc

SEQ ID NO: 2130 - DNA, 20 bp, Artificial sequence
  Synthetic oligonucleotide
tcagacatataataatctaa

SEQ ID NO: 2131 - DNA, 20 bp, Artificial sequence
  Synthetic oligonucleotide
tcattttaattcaacctaca

SEQ ID NO: 2132 - DNA, 20 bp, Artificial sequence
  Synthetic oligonucleotide
gagacttttaactcaggctc

SEQ ID NO: 2133 - DNA, 20 bp, Artificial sequence
  Synthetic oligonucleotide
agttcctaaatcatcaccat

SEQ ID NO: 2134 - DNA, 20 bp, Artificial sequence
  Synthetic oligonucleotide
acagctatcttctcatcaat

SEQ ID NO: 2135 - DNA, 20 bp, Artificial sequence
  Synthetic oligonucleotide
atgctcatccatacttagga

SEQ ID NO: 2136 - DNA, 20 bp, Artificial sequence
  Synthetic oligonucleotide
tttttccacatatctgaggc

SEQ ID NO: 2137 - DNA, 20 bp, Artificial sequence
  Synthetic oligonucleotide
gtaatatttctaactcacaa

SEQ ID NO: 2138 - DNA, 20 bp, Artificial sequence
  Synthetic oligonucleotide
gccaataaaaatgaacaaac

SEQ ID NO: 2139 - DNA, 20 bp, Artificial sequence
  Synthetic oligonucleotide
acaaggcttttcctccaatt

SEQ ID NO: 2140 - DNA, 20 bp, Artificial sequence
  Synthetic oligonucleotide
agcatttttatcaacatcta

SEQ ID NO: 2141 - DNA, 20 bp, Artificial sequence
  Synthetic oligonucleotide
cttaccacattcaataccca

SEQ ID NO: 2142 - DNA, 20 bp, Artificial sequence
  Synthetic oligonucleotide
tcttcatcacaatctacctt

SEQ ID NO: 2143 - DNA, 20 bp, Artificial sequence
  Synthetic oligonucleotide
ctgcaaataatattaggcat

SEQ ID NO: 2144 - DNA, 20 bp, Artificial sequence
  Synthetic oligonucleotide
tcttgataaaaatatcctaa

SEQ ID NO: 2145 - DNA, 20 bp, Artificial sequence
  Synthetic oligonucleotide
gtcacatacatcagctcaaa

SEQ ID NO: 2146 - DNA, 20 bp, Artificial sequence
  Synthetic oligonucleotide
gatcttattaaaatactcat

SEQ ID NO: 2147 - DNA, 20 bp, Artificial sequence
  Synthetic oligonucleotide
gtaacacctaacaacccaaa

SEQ ID NO: 2148 - DNA, 20 bp, Artificial sequence
  Synthetic oligonucleotide
cctacaccacatcagcgcaa

SEQ ID NO: 2149 - DNA, 20 bp, Artificial sequence
  Synthetic oligonucleotide
ggcttctagctatttagtca

SEQ ID NO: 2150 - DNA, 20 bp, Artificial sequence
  Synthetic oligonucleotide
tgtacataatttaattattc

SEQ ID NO: 2151 - DNA, 20 bp, Artificial sequence
  Synthetic oligonucleotide
acaagtcttatcacttctgc

SEQ ID NO: 2152 - DNA, 20 bp, Artificial sequence
  Synthetic oligonucleotide
tcataaattcatacagatac

SEQ ID NO: 2153 - DNA, 20 bp, Artificial sequence
  Synthetic oligonucleotide
ccatctctcaccctgaggtt

SEQ ID NO: 2154 - DNA, 20 bp, Artificial sequence
  Synthetic oligonucleotide
acctcagtaaaatataagca

SEQ ID NO: 2155 - DNA, 20 bp, Artificial sequence
  Synthetic oligonucleotide
aaccatataatcccaacaat

SEQ ID NO: 2156 - DNA, 20 bp, Artificial sequence
  Synthetic oligonucleotide
tgggtattttccttgactcc

SEQ ID NO: 2157 - DNA, 20 bp, Artificial sequence
  Synthetic oligonucleotide
tatgtgtaatatatactctc

SEQ ID NO: 2158 - DNA, 20 bp, Artificial sequence
  Synthetic oligonucleotide
ccttttctacaaattaactt

SEQ ID NO: 2159 - DNA, 20 bp, Artificial sequence
  Synthetic oligonucleotide
gttgactttctaaattacca

SEQ ID NO: 2160 - DNA, 20 bp, Artificial sequence
  Synthetic oligonucleotide
ggagaactgctatcaaggca

SEQ ID NO: 2161 - DNA, 20 bp, Artificial sequence
  Synthetic oligonucleotide
gtcacccatattactcatgc

SEQ ID NO: 2162 - DNA, 20 bp, Artificial sequence
  Synthetic oligonucleotide
gtacctagcacttcacctcc

SEQ ID NO: 2163 - DNA, 20 bp, Artificial sequence
  Synthetic oligonucleotide
ggcaattaacctccccatca

SEQ ID NO: 2164 - DNA, 20 bp, Artificial sequence
  Synthetic oligonucleotide
tggatcagacacattagcag

SEQ ID NO: 2165 - DNA, 20 bp, Artificial sequence
  Synthetic oligonucleotide
acccttacacatacttggtt

SEQ ID NO: 2166 - DNA, 20 bp, Artificial sequence
  Synthetic oligonucleotide
tgcatattaaaatctgggaa

SEQ ID NO: 2167 - DNA, 20 bp, Artificial sequence
  Synthetic oligonucleotide
gttattattctagccaggca

SEQ ID NO: 2168 - DNA, 20 bp, Artificial sequence
  Synthetic oligonucleotide
ttttccacatatctgaggct

SEQ ID NO: 2169 - DNA, 20 bp, Artificial sequence
  Synthetic oligonucleotide
agtcagcacatcgatgatca

SEQ ID NO: 2170 - DNA, 20 bp, Artificial sequence
  Synthetic oligonucleotide
gttcttagatattatgggta

SEQ ID NO: 2171 - DNA, 20 bp, Artificial sequence
  Synthetic oligonucleotide
cagacggattttctcaagtc

SEQ ID NO: 2172 - DNA, 20 bp, Artificial sequence
  Synthetic oligonucleotide
gcacttccaaaccatacaat

SEQ ID NO: 2173 - DNA, 20 bp, Artificial sequence
  Synthetic oligonucleotide
cagtcacaataacctagact

SEQ ID NO: 2174 - DNA, 20 bp, Artificial sequence
  Synthetic oligonucleotide
gtcacagccttccttccact

SEQ ID NO: 2175 - DNA, 20 bp, Artificial sequence
  Synthetic oligonucleotide
gcataatcatcttcacccaa

SEQ ID NO: 2176 - DNA, 20 bp, Artificial sequence
  Synthetic oligonucleotide
gtataccatttccaaccaca

SEQ ID NO: 2177 - DNA, 20 bp, Artificial sequence
  Synthetic oligonucleotide
tgccatatttattagcactt

SEQ ID NO: 2178 - DNA, 20 bp, Artificial sequence
  Synthetic oligonucleotide
tcacccatattactcatgca

SEQ ID NO: 2179 - DNA, 20 bp, Artificial sequence
  Synthetic oligonucleotide
gctttgtttttcatctgtgc

SEQ ID NO: 2180 - DNA, 20 bp, Artificial sequence
  Synthetic oligonucleotide
agttaaactatccataggca

SEQ ID NO: 2181 - DNA, 20 bp, Artificial sequence
  Synthetic oligonucleotide
cgtgttggttttattcccaa

SEQ ID NO: 2182 - DNA, 20 bp, Artificial sequence
  Synthetic oligonucleotide
ggttatcaatcattatacca

SEQ ID NO: 2183 - DNA, 20 bp, Artificial sequence
  Synthetic oligonucleotide
gtcttatcacttctgcaatc

SEQ ID NO: 2184 - DNA, 20 bp, Artificial sequence
  Synthetic oligonucleotide
actctcagttatctattcct

SEQ ID NO: 2185 - DNA, 20 bp, Artificial sequence
  Synthetic oligonucleotide
gtgttgaattacccactcca

SEQ ID NO: 2186 - DNA, 20 bp, Artificial sequence
  Synthetic oligonucleotide
gtggcactgtccttcagccc

SEQ ID NO: 2187 - DNA, 20 bp, Artificial sequence
  Synthetic oligonucleotide
gcagcagcatataccgagtc

SEQ ID NO: 2188 - DNA, 20 bp, Artificial sequence
  Synthetic oligonucleotide
tccgttttcaactatttcaa

SEQ ID NO: 2189 - DNA, 20 bp, Artificial sequence
  Synthetic oligonucleotide
tagtcatttatttaaagcaa

SEQ ID NO: 2190 - DNA, 20 bp, Artificial sequence
  Synthetic oligonucleotide
ttgtagctatttaatcgcta

SEQ ID NO: 2191 - DNA, 20 bp, Artificial sequence
  Synthetic oligonucleotide
cacatggcacttccttccat

SEQ ID NO: 2192 - DNA, 20 bp, Artificial sequence
  Synthetic oligonucleotide
gcatatctaaaattatcaat

SEQ ID NO: 2193 - DNA, 20 bp, Artificial sequence
  Synthetic oligonucleotide
atcaactaacatctttccta

SEQ ID NO: 2194 - DNA, 20 bp, Artificial sequence
  Synthetic oligonucleotide
tggtaaaataacatttccaa

SEQ ID NO: 2195 - DNA, 20 bp, Artificial sequence
  Synthetic oligonucleotide
gagcacctactcccattcca

SEQ ID NO: 2196 - DNA, 20 bp, Artificial sequence
  Synthetic oligonucleotide
aacaacccaaaataacctca

SEQ ID NO: 2197 - DNA, 20 bp, Artificial sequence
  Synthetic oligonucleotide
catcataaaacaattttcca

SEQ ID NO: 2198 - DNA, 20 bp, Artificial sequence
  Synthetic oligonucleotide
tgctcatccatacttaggaa

SEQ ID NO: 2199 - DNA, 20 bp, Artificial sequence
  Synthetic oligonucleotide
ctattttcccactcatcaca

SEQ ID NO: 2200 - DNA, 20 bp, Artificial sequence
  Synthetic oligonucleotide
tcttcccacaacatttccac

SEQ ID NO: 2201 - DNA, 20 bp, Artificial sequence
  Synthetic oligonucleotide
aagcaattcattccctgtta

SEQ ID NO: 2202 - DNA, 20 bp, Artificial sequence
  Synthetic oligonucleotide
cacttccattttaatgactt

SEQ ID NO: 2203 - DNA, 20 bp, Artificial sequence
  Synthetic oligonucleotide
cagatacacacatacactct

SEQ ID NO: 2204 - DNA, 20 bp, Artificial sequence
  Synthetic oligonucleotide
gggaaatacttcacagagca

SEQ ID NO: 2205 - DNA, 20 bp, Artificial sequence
  Synthetic oligonucleotide
gtttagccatttaaagattg

SEQ ID NO: 2206 - DNA, 20 bp, Artificial sequence
  Synthetic oligonucleotide
gttttttcactcactacatc

SEQ ID NO: 2207 - DNA, 20 bp, Artificial sequence
  Synthetic oligonucleotide
gaaaagtacattcataggtt

SEQ ID NO: 2208 - DNA, 20 bp, Artificial sequence
  Synthetic oligonucleotide
ttgctgctcactcatttcca

SEQ ID NO: 2209 - DNA, 20 bp, Artificial sequence
  Synthetic oligonucleotide
atagatatatattattctaa

SEQ ID NO: 2210 - DNA, 20 bp, Artificial sequence
  Synthetic oligonucleotide
tactttgttttttaaatcat

SEQ ID NO: 2211 - DNA, 20 bp, Artificial sequence
  Synthetic oligonucleotide
agagattcatcatattgcca

SEQ ID NO: 2212 - DNA, 20 bp, Artificial sequence
  Synthetic oligonucleotide
tcatgctactcctctgctct

SEQ ID NO: 2213 - DNA, 20 bp, Artificial sequence
  Synthetic oligonucleotide
cttatttttcagaatacgaa

SEQ ID NO: 2214 - DNA, 20 bp, Artificial sequence
  Synthetic oligonucleotide
agccatactccccttacagc

SEQ ID NO: 2215 - DNA, 20 bp, Artificial sequence
  Synthetic oligonucleotide
acccacctttcacaaggacc

SEQ ID NO: 2216 - DNA, 20 bp, Artificial sequence
  Synthetic oligonucleotide
aggtgttaatttacacagtg

SEQ ID NO: 2217 - DNA, 20 bp, Artificial sequence
  Synthetic oligonucleotide
gctacaacaagaaccaatct

SEQ ID NO: 2218 - DNA, 20 bp, Artificial sequence
  Synthetic oligonucleotide
gcccacctttttaatttcct

SEQ ID NO: 2219 - DNA, 20 bp, Artificial sequence
  Synthetic oligonucleotide
ttttaattcaacctacactc

SEQ ID NO: 2220 - DNA, 20 bp, Artificial sequence
  Synthetic oligonucleotide
gctctcaattaaatactcaa

SEQ ID NO: 2221 - DNA, 20 bp, Artificial sequence
  Synthetic oligonucleotide
ctatcttctcatcaatactc

SEQ ID NO: 2222 - DNA, 20 bp, Artificial sequence
  Synthetic oligonucleotide
ccattctgaatgcctagata

SEQ ID NO: 2223 - DNA, 20 bp, Artificial sequence
  Synthetic oligonucleotide
cccaggtatctcctaggctt

SEQ ID NO: 2224 - DNA, 20 bp, Artificial sequence
  Synthetic oligonucleotide
gactttctaaattaccattt

SEQ ID NO: 2225 - DNA, 20 bp, Artificial sequence
  Synthetic oligonucleotide
tctctttttcctgtgggcca

SEQ ID NO: 2226 - DNA, 20 bp, Artificial sequence
  Synthetic oligonucleotide
gagacttccatttctttcct

SEQ ID NO: 2227 - DNA, 20 bp, Artificial sequence
  Synthetic oligonucleotide
tggttctttctccttcccct

SEQ ID NO: 2228 - DNA, 20 bp, Artificial sequence
  Synthetic oligonucleotide
gcaggcccaaatactggttg

SEQ ID NO: 2229 - DNA, 20 bp, Artificial sequence
  Synthetic oligonucleotide
cacgaaactctcctatagcc

SEQ ID NO: 2230 - DNA, 20 bp, Artificial sequence
  Synthetic oligonucleotide
gctctgttacttcctcaggc

SEQ ID NO: 2231 - DNA, 20 bp, Artificial sequence
  Synthetic oligonucleotide
gttcctaaatcatcaccatt

SEQ ID NO: 2232 - DNA, 20 bp, Artificial sequence
  Synthetic oligonucleotide
gtacataatttaattattct

SEQ ID NO: 2233 - DNA, 20 bp, Artificial sequence
  Synthetic oligonucleotide
tctaaagctttatattttcc

SEQ ID NO: 2234 - DNA, 20 bp, Artificial sequence
  Synthetic oligonucleotide
agactttacacttaatgata

SEQ ID NO: 2235 - DNA, 20 bp, Artificial sequence
  Synthetic oligonucleotide
actatgttacttaagaacat

SEQ ID NO: 2236 - DNA, 20 bp, Artificial sequence
  Synthetic oligonucleotide
gccaacaacttcatgagcac

SEQ ID NO: 2237 - DNA, 20 bp, Artificial sequence
  Synthetic oligonucleotide
ccatataatcccaacaatgc

SEQ ID NO: 2238 - DNA, 20 bp, Artificial sequence
  Synthetic oligonucleotide
cttcatcacaatctacctta

SEQ ID NO: 2239 - DNA, 20 bp, Artificial sequence
  Synthetic oligonucleotide
ccttagacactcacatgctt

SEQ ID NO: 2240 - DNA, 20 bp, Artificial sequence
  Synthetic oligonucleotide
agttcttaaaataatgcaca

SEQ ID NO: 2241 - DNA, 20 bp, Artificial sequence
  Synthetic oligonucleotide
tactatcaaaatcatcacta

SEQ ID NO: 2242 - DNA, 20 bp, Artificial sequence
  Synthetic oligonucleotide
agatgcctccttcccatcca

SEQ ID NO: 2243 - DNA, 20 bp, Artificial sequence
  Synthetic oligonucleotide
agctacatttttcccataac

SEQ ID NO: 2244 - DNA, 20 bp, Artificial sequence
  Synthetic oligonucleotide
gcagagccacacagctccca

SEQ ID NO: 2245 - DNA, 20 bp, Artificial sequence
  Synthetic oligonucleotide
actttgttttttaaatcatt

SEQ ID NO: 2246 - DNA, 20 bp, Artificial sequence
  Synthetic oligonucleotide
gtcacaataacctagactca

SEQ ID NO: 2247 - DNA, 20 bp, Artificial sequence
  Synthetic oligonucleotide
ccattctttttaatttcctt

SEQ ID NO: 2248 - DNA, 20 bp, Artificial sequence
  Synthetic oligonucleotide
gcaaggccaatcacataggc

SEQ ID NO: 2249 - DNA, 20 bp, Artificial sequence
  Synthetic oligonucleotide
tgtaacttttataattttca

SEQ ID NO: 2250 - DNA, 20 bp, Artificial sequence
  Synthetic oligonucleotide
ttttcaactatttcaaggca

SEQ ID NO: 2251 - DNA, 20 bp, Artificial sequence
  Synthetic oligonucleotide
gctcctataatttaacacca

SEQ ID NO: 2252 - DNA, 20 bp, Artificial sequence
  Synthetic oligonucleotide
gctcatccatacttaggaac

SEQ ID NO: 2253 - DNA, 20 bp, Artificial sequence
  Synthetic oligonucleotide
cacttccaaaccatacaata

SEQ ID NO: 2254 - DNA, 20 bp, Artificial sequence
  Synthetic oligonucleotide
ccataggcaatttttcatcc

SEQ ID NO: 2255 - DNA, 20 bp, Artificial sequence
  Synthetic oligonucleotide
ggaaaatgatttctacccca

SEQ ID NO: 2256 - DNA, 20 bp, Artificial sequence
  Synthetic oligonucleotide
tgcaaattcactcaaatgtc

SEQ ID NO: 2257 - DNA, 20 bp, Artificial sequence
  Synthetic oligonucleotide
acactgttacttcattatct

SEQ ID NO: 2258 - DNA, 20 bp, Artificial sequence
  Synthetic oligonucleotide
taccatttccaaccacactt

SEQ ID NO: 2259 - DNA, 20 bp, Artificial sequence
  Synthetic oligonucleotide
ctctcagttatctattccta

SEQ ID NO: 2260 - DNA, 20 bp, Artificial sequence
  Synthetic oligonucleotide
tgctaggtcacaattaagtg

SEQ ID NO: 2261 - DNA, 20 bp, Artificial sequence
  Synthetic oligonucleotide
gttgaattacccactccact

SEQ ID NO: 2262 - DNA, 20 bp, Artificial sequence
  Synthetic oligonucleotide
ggccacatcctccattatca

SEQ ID NO: 2263 - DNA, 20 bp, Artificial sequence
  Synthetic oligonucleotide
caggttagtcccactcagta

SEQ ID NO: 2264 - DNA, 20 bp, Artificial sequence
  Synthetic oligonucleotide
actttctaaattaccattta

SEQ ID NO: 2265 - DNA, 20 bp, Artificial sequence
  Synthetic oligonucleotide
ttggttttattcccaacaca

SEQ ID NO: 2266 - DNA, 20 bp, Artificial sequence
  Synthetic oligonucleotide
gctacatttttcccataaca

SEQ ID NO: 2267 - DNA, 20 bp, Artificial sequence
  Synthetic oligonucleotide
gccatactccccttacagcg

SEQ ID NO: 2268 - DNA, 20 bp, Artificial sequence
  Synthetic oligonucleotide
tctgaggcttttccaggtta

SEQ ID NO: 2269 - DNA, 20 bp, Artificial sequence
  Synthetic oligonucleotide
tcttagtttaatactcagaa

SEQ ID NO: 2270 - DNA, 20 bp, Artificial sequence
  Synthetic oligonucleotide
gaagcagtatatcagaccac

SEQ ID NO: 2271 - DNA, 20 bp, Artificial sequence
  Synthetic oligonucleotide
ataccgagtcttacttttcc

SEQ ID NO: 2272 - DNA, 20 bp, Artificial sequence
  Synthetic oligonucleotide
cacacatacactcttctttc

SEQ ID NO: 2273 - DNA, 20 bp, Artificial sequence
  Synthetic oligonucleotide
aaatcatcactataacctcc

SEQ ID NO: 2274 - DNA, 20 bp, Artificial sequence
  Synthetic oligonucleotide
agcaagacatcttaacatct

SEQ ID NO: 2275 - DNA, 20 bp, Artificial sequence
  Synthetic oligonucleotide
tcatcaatactcaaacaggt

SEQ ID NO: 2276 - DNA, 20 bp, Artificial sequence
  Synthetic oligonucleotide
acatggcacttccttccatc

SEQ ID NO: 2277 - DNA, 20 bp, Artificial sequence
  Synthetic oligonucleotide
aacacaagttcctctagggc

SEQ ID NO: 2278 - DNA, 20 bp, Artificial sequence
  Synthetic oligonucleotide
acttaagaacatccatttcc

SEQ ID NO: 2279 - DNA, 20 bp, Artificial sequence
  Synthetic oligonucleotide
attaaggtttcatttctcta

SEQ ID NO: 2280 - DNA, 20 bp, Artificial sequence
  Synthetic oligonucleotide
atgcacagtattaatcacat

SEQ ID NO: 2281 - DNA, 20 bp, Artificial sequence
  Synthetic oligonucleotide
gtcggtaccgtctaacacct

SEQ ID NO: 2282 - DNA, 20 bp, Artificial sequence
  Synthetic oligonucleotide
acaagggattctattattgc

SEQ ID NO: 2283 - DNA, 20 bp, Artificial sequence
  Synthetic oligonucleotide
tgagtattcataacaagact

SEQ ID NO: 2284 - DNA, 20 bp, Artificial sequence
  Synthetic oligonucleotide
atcataaaacaattttccat

SEQ ID NO: 2285 - DNA, 20 bp, Artificial sequence
  Synthetic oligonucleotide
cttgcttaatagtttggcca

SEQ ID NO: 2286 - DNA, 20 bp, Artificial sequence
  Synthetic oligonucleotide
atataatcccaacaatgcta

SEQ ID NO: 2287 - DNA, 20 bp, Artificial sequence
  Synthetic oligonucleotide
cttcccacaacatttccaca

SEQ ID NO: 2288 - DNA, 20 bp, Artificial sequence
  Synthetic oligonucleotide
acactgtacacattttattt

SEQ ID NO: 2289 - DNA, 20 bp, Artificial sequence
  Synthetic oligonucleotide
gcacaaacattatcattaaa

SEQ ID NO: 2290 - DNA, 20 bp, Artificial sequence
  Synthetic oligonucleotide
agacactcacatgcttgtta

SEQ ID NO: 2291 - DNA, 20 bp, Artificial sequence
  Synthetic oligonucleotide
gcattcagaatgcacagcct

SEQ ID NO: 2292 - DNA, 20 bp, Artificial sequence
  Synthetic oligonucleotide
taccacagactttctggatt

SEQ ID NO: 2293 - DNA, 20 bp, Artificial sequence
  Synthetic oligonucleotide
ttcctaactttctttcataa

SEQ ID NO: 2294 - DNA, 20 bp, Artificial sequence
  Synthetic oligonucleotide
gcacttttaatactatatca

SEQ ID NO: 2295 - DNA, 20 bp, Artificial sequence
  Synthetic oligonucleotide
aaagctttatattttcccaa

SEQ ID NO: 2296 - DNA, 20 bp, Artificial sequence
  Synthetic oligonucleotide
tggtcattttcacttatctt

SEQ ID NO: 2297 - DNA, 20 bp, Artificial sequence
  Synthetic oligonucleotide
tcactcactacatctattcc

SEQ ID NO: 2298 - DNA, 20 bp, Artificial sequence
  Synthetic oligonucleotide
cacaatctaccttattacac

SEQ ID NO: 2299 - DNA, 20 bp, Artificial sequence
  Synthetic oligonucleotide
ttcccactcatcacaggaca

SEQ ID NO: 2300 - DNA, 20 bp, Artificial sequence
  Synthetic oligonucleotide
acatctttcctataaatcag

SEQ ID NO: 2301 - DNA, 20 bp, Artificial sequence
  Synthetic oligonucleotide
gtcaagacaccattcagcta

SEQ ID NO: 2302 - DNA, 20 bp, Artificial sequence
  Synthetic oligonucleotide
cccaaaataacctcatgctc

SEQ ID NO: 2303 - DNA, 20 bp, Artificial sequence
  Synthetic oligonucleotide
tgtcagcaacataaattctt

SEQ ID NO: 2304 - DNA, 20 bp, Artificial sequence
  Synthetic oligonucleotide
tttacacttaatgataggtt

SEQ ID NO: 2305 - DNA, 20 bp, Artificial sequence
  Synthetic oligonucleotide
caatgtcaactttattacta

SEQ ID NO: 2306 - DNA, 20 bp, Artificial sequence
  Synthetic oligonucleotide
gtagtcactttcacttcacc

SEQ ID NO: 2307 - DNA, 20 bp, Artificial sequence
  Synthetic oligonucleotide
gagcattttaaatctatctt

SEQ ID NO: 2308 - DNA, 20 bp, Artificial sequence
  Synthetic oligonucleotide
gaacgaactcatacacgctc

SEQ ID NO: 2309 - DNA, 20 bp, Artificial sequence
  Synthetic oligonucleotide
acaacaagaaccaatctcac

SEQ ID NO: 2310 - DNA, 20 bp, Artificial sequence
  Synthetic oligonucleotide
tgctcactcatttccacctt

SEQ ID NO: 2311 - DNA, 20 bp, Artificial sequence
  Synthetic oligonucleotide
agtcatttatttaaagcaaa

SEQ ID NO: 2312 - DNA, 20 bp, Artificial sequence
  Synthetic oligonucleotide
aattcattccctgttaggga

SEQ ID NO: 2313 - DNA, 20 bp, Artificial sequence
  Synthetic oligonucleotide
tccattttaatgacttggct

SEQ ID NO: 2314 - DNA, 20 bp, Artificial sequence
  Synthetic oligonucleotide
gtgacagcaattcttttcct

SEQ ID NO: 2315 - DNA, 20 bp, Artificial sequence
  Synthetic oligonucleotide
acagccttccttccactggc

SEQ ID NO: 2316 - DNA, 20 bp, Artificial sequence
  Synthetic oligonucleotide
agacggattttctcaagtca

SEQ ID NO: 2317 - DNA, 20 bp, Artificial sequence
  Synthetic oligonucleotide
cctgctaaattccattcctt

SEQ ID NO: 2318 - DNA, 20 bp, Artificial sequence
  Synthetic oligonucleotide
gaggacagaattctaatcca

SEQ ID NO: 2319 - DNA, 20 bp, Artificial sequence
  Synthetic oligonucleotide
ctgaagcttttttctagaaa

SEQ ID NO: 2320 - DNA, 20 bp, Artificial sequence
  Synthetic oligonucleotide
catgctactcctctgctcta

SEQ ID NO: 2321 - DNA, 20 bp, Artificial sequence
  Synthetic oligonucleotide
agcacctactcccattccaa

SEQ ID NO: 2322 - DNA, 20 bp, Artificial sequence
  Synthetic oligonucleotide
aagccagttttatattccaa

SEQ ID NO: 2323 - DNA, 20 bp, Artificial sequence
  Synthetic oligonucleotide
agcattttaaatctatctta

SEQ ID NO: 2324 - DNA, 20 bp, Artificial sequence
  Synthetic oligonucleotide
ggctatataaaaattatggc

SEQ ID NO: 2325 - DNA, 20 bp, Artificial sequence
  Synthetic oligonucleotide
tctcagttatctattcctaa

SEQ ID NO: 2326 - DNA, 20 bp, Artificial sequence
  Synthetic oligonucleotide
ccaaaataacctcatgctca

SEQ ID NO: 2327 - DNA, 20 bp, Artificial sequence
  Synthetic oligonucleotide
cccacaacatttccacaaat

SEQ ID NO: 2328 - DNA, 20 bp, Artificial sequence
  Synthetic oligonucleotide
tggttttattcccaacacac

SEQ ID NO: 2329 - DNA, 20 bp, Artificial sequence
  Synthetic oligonucleotide
gcctctatatattctggtta

SEQ ID NO: 2330 - DNA, 20 bp, Artificial sequence
  Synthetic oligonucleotide
actgttacttcattatctaa

SEQ ID NO: 2331 - DNA, 20 bp, Artificial sequence
  Synthetic oligonucleotide
cgttgcctactatctgttta

SEQ ID NO: 2332 - DNA, 20 bp, Artificial sequence
  Synthetic oligonucleotide
tgtacacattttatttactt

SEQ ID NO: 2333 - DNA, 20 bp, Artificial sequence
  Synthetic oligonucleotide
agtcttacttttccattcaa

SEQ ID NO: 2334 - DNA, 20 bp, Artificial sequence
  Synthetic oligonucleotide
acacaagttcctctagggca

SEQ ID NO: 2335 - DNA, 20 bp, Artificial sequence
  Synthetic oligonucleotide
cactcatttccaccttcagc

SEQ ID NO: 2336 - DNA, 20 bp, Artificial sequence
  Synthetic oligonucleotide
tttcaactatttcaaggcaa

SEQ ID NO: 2337 - DNA, 20 bp, Artificial sequence
  Synthetic oligonucleotide
ggaagacacatcccatcact

SEQ ID NO: 2338 - DNA, 20 bp, Artificial sequence
  Synthetic oligonucleotide
agcaacataaattcttatta

SEQ ID NO: 2339 - DNA, 20 bp, Artificial sequence
  Synthetic oligonucleotide
gacaatttttccacagggcc

SEQ ID NO: 2340 - DNA, 20 bp, Artificial sequence
  Synthetic oligonucleotide
aggacagaattctaatccaa

SEQ ID NO: 2341 - DNA, 20 bp, Artificial sequence
  Synthetic oligonucleotide
ccttattttattccccacca

SEQ ID NO: 2342 - DNA, 20 bp, Artificial sequence
  Synthetic oligonucleotide
tccaggttatcttcctataa

SEQ ID NO: 2343 - DNA, 20 bp, Artificial sequence
  Synthetic oligonucleotide
aagcagactacattttcaca

SEQ ID NO: 2344 - DNA, 20 bp, Artificial sequence
  Synthetic oligonucleotide
tgttttttaaatcattagtt

SEQ ID NO: 2345 - DNA, 20 bp, Artificial sequence
  Synthetic oligonucleotide
tgcttgctcacttcttcctg

SEQ ID NO: 2346 - DNA, 20 bp, Artificial sequence
  Synthetic oligonucleotide
actgattgatttcaatccac

SEQ ID NO: 2347 - DNA, 20 bp, Artificial sequence
  Synthetic oligonucleotide
cttccaaaccatacaataga

SEQ ID NO: 2348 - DNA, 20 bp, Artificial sequence
  Synthetic oligonucleotide
acatacactcttctttctgt

SEQ ID NO: 2349 - DNA, 20 bp, Artificial sequence
  Synthetic oligonucleotide
ttctcaataaatgaactcta

SEQ ID NO: 2350 - DNA, 20 bp, Artificial sequence
  Synthetic oligonucleotide
ggttagtcccactcagtacc

SEQ ID NO: 2351 - DNA, 20 bp, Artificial sequence
  Synthetic oligonucleotide
ccacataatacatttagtca

SEQ ID NO: 2352 - DNA, 20 bp, Artificial sequence
  Synthetic oligonucleotide
gctttatattttcccaaatt

SEQ ID NO: 2353 - DNA, 20 bp, Artificial sequence
  Synthetic oligonucleotide
tgcttgttacatattatctt

SEQ ID NO: 2354 - DNA, 20 bp, Artificial sequence
  Synthetic oligonucleotide
gccacttttattttacagta

SEQ ID NO: 2355 - DNA, 20 bp, Artificial sequence
  Synthetic oligonucleotide
tggcacttccttccatctgc

SEQ ID NO: 2356 - DNA, 20 bp, Artificial sequence
  Synthetic oligonucleotide
actttctttcataatgagaa

SEQ ID NO: 2357 - DNA, 20 bp, Artificial sequence
  Synthetic oligonucleotide
aaagatttcagtactactcc

SEQ ID NO: 2358 - DNA, 20 bp, Artificial sequence
  Synthetic oligonucleotide
ttttagttccccttccactc

SEQ ID NO: 2359 - DNA, 20 bp, Artificial sequence
  Synthetic oligonucleotide
actcctctgctctaatcctc

SEQ ID NO: 2360 - DNA, 20 bp, Artificial sequence
  Synthetic oligonucleotide
tgctctttcctaccagccca

SEQ ID NO: 2361 - DNA, 20 bp, Artificial sequence
  Synthetic oligonucleotide
gccaagcactatatacaact

SEQ ID NO: 2362 - DNA, 20 bp, Artificial sequence
  Synthetic oligonucleotide
gtttcatttctctaggatta

SEQ ID NO: 2363 - DNA, 20 bp, Artificial sequence
  Synthetic oligonucleotide
gcacctactcccattccaaa

SEQ ID NO: 2364 - DNA, 20 bp, Artificial sequence
  Synthetic oligonucleotide
cactcactacatctattcct

SEQ ID NO: 2365 - DNA, 20 bp, Artificial sequence
  Synthetic oligonucleotide
tcacatactttacacgggca

SEQ ID NO: 2366 - DNA, 20 bp, Artificial sequence
  Synthetic oligonucleotide
ggttatttctaaatatatcc

SEQ ID NO: 2367 - DNA, 20 bp, Artificial sequence
  Synthetic oligonucleotide
tgacagcaattcttttccta

SEQ ID NO: 2368 - DNA, 20 bp, Artificial sequence
  Synthetic oligonucleotide
ccattcctttttaaagaggt

SEQ ID NO: 2369 - DNA, 20 bp, Artificial sequence
  Synthetic oligonucleotide
tacaggcattctaaatgcta

SEQ ID NO: 2370 - DNA, 20 bp, Artificial sequence
  Synthetic oligonucleotide
ataggcaatttttcatccca

SEQ ID NO: 2371 - DNA, 20 bp, Artificial sequence
  Synthetic oligonucleotide
cttaagaacatccatttccc

SEQ ID NO: 2372 - DNA, 20 bp, Artificial sequence
  Synthetic oligonucleotide
gcaaagcattctcattacaa

SEQ ID NO: 2373 - DNA, 20 bp, Artificial sequence
  Synthetic oligonucleotide
acagtattaatcacatttca

SEQ ID NO: 2374 - DNA, 20 bp, Artificial sequence
  Synthetic oligonucleotide
aaagagcacattttacacac

SEQ ID NO: 2375 - DNA, 20 bp, Artificial sequence
  Synthetic oligonucleotide
acaattttccatataaagta

SEQ ID NO: 2376 - DNA, 20 bp, Artificial sequence
  Synthetic oligonucleotide
gctttcactaaatcaggaac

SEQ ID NO: 2377 - DNA, 20 bp, Artificial sequence
  Synthetic oligonucleotide
tacccactccacttagttct

SEQ ID NO: 2378 - DNA, 20 bp, Artificial sequence
  Synthetic oligonucleotide
gcctaggattatattaaatt

SEQ ID NO: 2379 - DNA, 20 bp, Artificial sequence
  Synthetic oligonucleotide
ttcctataaatcagagctcc

SEQ ID NO: 2380 - DNA, 20 bp, Artificial sequence
  Synthetic oligonucleotide
agcttatctatatcttcttg

SEQ ID NO: 2381 - DNA, 20 bp, Artificial sequence
  Synthetic oligonucleotide
ccatgatgccatcacagagc

SEQ ID NO: 2382 - DNA, 20 bp, Artificial sequence
  Synthetic oligonucleotide
gccagcctcctctaattgtg

SEQ ID NO: 2383 - DNA, 20 bp, Artificial sequence
  Synthetic oligonucleotide
ttgaagctttcttttacagt

SEQ ID NO: 2384 - DNA, 20 bp, Artificial sequence
  Synthetic oligonucleotide
ggtcctatcatattttaacc

SEQ ID NO: 2385 - DNA, 20 bp, Artificial sequence
  Synthetic oligonucleotide
tggcatttttatgaatgcaa

SEQ ID NO: 2386 - DNA, 20 bp, Artificial sequence
  Synthetic oligonucleotide
gctgagaacacagcctgcta

SEQ ID NO: 2387 - DNA, 20 bp, Artificial sequence
  Synthetic oligonucleotide
gtcaactttattactataga

SEQ ID NO: 2388 - DNA, 20 bp, Artificial sequence
  Synthetic oligonucleotide
tcctaaacttctaattcaca

SEQ ID NO: 2389 - DNA, 20 bp, Artificial sequence
  Synthetic oligonucleotide
gcaactcaaatacctgttca

SEQ ID NO: 2390 - DNA, 20 bp, Artificial sequence
  Synthetic oligonucleotide
accaatctcacaattaagta

SEQ ID NO: 2391 - DNA, 20 bp, Artificial sequence
  Synthetic oligonucleotide
acaatctaccttattacacc

SEQ ID NO: 2392 - DNA, 20 bp, Artificial sequence
  Synthetic oligonucleotide
ctggattataattctaggtt

SEQ ID NO: 2393 - DNA, 20 bp, Artificial sequence
  Synthetic oligonucleotide
gcaaattcactcaaatgtca

SEQ ID NO: 2394 - DNA, 20 bp, Artificial sequence
  Synthetic oligonucleotide
cctactgttttcatttctca

SEQ ID NO: 2395 - DNA, 20 bp, Artificial sequence
  Synthetic oligonucleotide
atcaatactcaaacaggtca

SEQ ID NO: 2396 - DNA, 20 bp, Artificial sequence
  Synthetic oligonucleotide
gcaagacatcttaacatctg

SEQ ID NO: 2397 - DNA, 20 bp, Artificial sequence
  Synthetic oligonucleotide
aactggtttccatcagctgc

SEQ ID NO: 2398 - DNA, 20 bp, Artificial sequence
  Synthetic oligonucleotide
acatttttcccataacagaa

SEQ ID NO: 2399 - DNA, 20 bp, Artificial sequence
  Synthetic oligonucleotide
gaagcattaactttactggc

SEQ ID NO: 2400 - DNA, 20 bp, Artificial sequence
  Synthetic oligonucleotide
aacagagcacctccaaacca

SEQ ID NO: 2401 - DNA, 20 bp, Artificial sequence
  Synthetic oligonucleotide
gtcttacttttccattcaat

SEQ ID NO: 2402 - DNA, 20 bp, Artificial sequence
  Synthetic oligonucleotide
gcaattcttttcctatgcaa

SEQ ID NO: 2403 - DNA, 20 bp, Artificial sequence
  Synthetic oligonucleotide
ggcattctaaatgctacctc

SEQ ID NO: 2404 - DNA, 20 bp, Artificial sequence
  Synthetic oligonucleotide
gaagacacatcccatcacta

SEQ ID NO: 2405 - DNA, 20 bp, Artificial sequence
  Synthetic oligonucleotide
aggttgtatcacctctgaca

SEQ ID NO: 2406 - DNA, 20 bp, Artificial sequence
  Synthetic oligonucleotide
agagcacattttacacacag

SEQ ID NO: 2407 - DNA, 20 bp, Artificial sequence
  Synthetic oligonucleotide
gctatataaaaattatggca

SEQ ID NO: 2408 - DNA, 20 bp, Artificial sequence
  Synthetic oligonucleotide
gcagactacattttcacaat

SEQ ID NO: 2409 - DNA, 20 bp, Artificial sequence
  Synthetic oligonucleotide
cttcctataatatattccaa

SEQ ID NO: 2410 - DNA, 20 bp, Artificial sequence
  Synthetic oligonucleotide
gcttatctatatcttcttga

SEQ ID NO: 2411 - DNA, 20 bp, Artificial sequence
  Synthetic oligonucleotide
gcatgaagaaatattacact

SEQ ID NO: 2412 - DNA, 20 bp, Artificial sequence
  Synthetic oligonucleotide
ctagaggtcatcttcggtca

SEQ ID NO: 2413 - DNA, 20 bp, Artificial sequence
  Synthetic oligonucleotide
gtccttgttattctatctta

SEQ ID NO: 2414 - DNA, 20 bp, Artificial sequence
  Synthetic oligonucleotide
gcattttaaatctatcttac

SEQ ID NO: 2415 - DNA, 20 bp, Artificial sequence
  Synthetic oligonucleotide
tccaacagtccctaatggga

SEQ ID NO: 2416 - DNA, 20 bp, Artificial sequence
  Synthetic oligonucleotide
actgttttcatttctcagca

SEQ ID NO: 2417 - DNA, 20 bp, Artificial sequence
  Synthetic oligonucleotide
taggcaatttttcatcccat

SEQ ID NO: 2418 - DNA, 20 bp, Artificial sequence
  Synthetic oligonucleotide
cctcagtgacacatacgctc

SEQ ID NO: 2419 - DNA, 20 bp, Artificial sequence
  Synthetic oligonucleotide
ccacttagttctacacctca

SEQ ID NO: 2420 - DNA, 20 bp, Artificial sequence
  Synthetic oligonucleotide
ccaagcactatatacaacta

SEQ ID NO: 2421 - DNA, 20 bp, Artificial sequence
  Synthetic oligonucleotide
cagaacagaatcatacacag

SEQ ID NO: 2422 - DNA, 20 bp, Artificial sequence
  Synthetic oligonucleotide
gacatcttaacatctgactc

SEQ ID NO: 2423 - DNA, 20 bp, Artificial sequence
  Synthetic oligonucleotide
gttttattcccaacacacat

SEQ ID NO: 2424 - DNA, 20 bp, Artificial sequence
  Synthetic oligonucleotide
ctgacacaatcattaccaac

SEQ ID NO: 2425 - DNA, 20 bp, Artificial sequence
  Synthetic oligonucleotide
ctgattgatttcaatccaca

SEQ ID NO: 2426 - DNA, 20 bp, Artificial sequence
  Synthetic oligonucleotide
gtcctattccttatacacta

SEQ ID NO: 2427 - DNA, 20 bp, Artificial sequence
  Synthetic oligonucleotide
ttcagtactactccatgtca

SEQ ID NO: 2428 - DNA, 20 bp, Artificial sequence
  Synthetic oligonucleotide
aaagtaatatttacaggctc

SEQ ID NO: 2429 - DNA, 20 bp, Artificial sequence
  Synthetic oligonucleotide
tgctctaatcctccagtgac

SEQ ID NO: 2430 - DNA, 20 bp, Artificial sequence
  Synthetic oligonucleotide
ccacctctatctctaccatc

SEQ ID NO: 2431 - DNA, 20 bp, Artificial sequence
  Synthetic oligonucleotide
tgtacagttcatcctagtaa

SEQ ID NO: 2432 - DNA, 20 bp, Artificial sequence
  Synthetic oligonucleotide
gtcaataaagtatccacgac

SEQ ID NO: 2433 - DNA, 20 bp, Artificial sequence
  Synthetic oligonucleotide
actcactacatctattccta

SEQ ID NO: 2434 - DNA, 20 bp, Artificial sequence
  Synthetic oligonucleotide
taggattatattaaattcta

SEQ ID NO: 2435 - DNA, 20 bp, Artificial sequence
  Synthetic oligonucleotide
atcttatgactttcttgggt

SEQ ID NO: 2436 - DNA, 20 bp, Artificial sequence
  Synthetic oligonucleotide
cagttatctattcctaagct

SEQ ID NO: 2437 - DNA, 20 bp, Artificial sequence
  Synthetic oligonucleotide
gatgcatattttatctacct

SEQ ID NO: 2438 - DNA, 20 bp, Artificial sequence
  Synthetic oligonucleotide
ttcttttaaaattaagatac

SEQ ID NO: 2439 - DNA, 20 bp, Artificial sequence
  Synthetic oligonucleotide
actgctttgatctcttgcca

SEQ ID NO: 2440 - DNA, 20 bp, Artificial sequence
  Synthetic oligonucleotide
gctttaggtttaaatccgat

SEQ ID NO: 2441 - DNA, 20 bp, Artificial sequence
  Synthetic oligonucleotide
atcacatttcattaagacca

SEQ ID NO: 2442 - DNA, 20 bp, Artificial sequence
  Synthetic oligonucleotide
tgcaaaagtccatctatact

SEQ ID NO: 2443 - DNA, 20 bp, Artificial sequence
  Synthetic oligonucleotide
cacaagttcctctagggcac

SEQ ID NO: 2444 - DNA, 20 bp, Artificial sequence
  Synthetic oligonucleotide
taagaacatccatttcccat

SEQ ID NO: 2445 - DNA, 20 bp, Artificial sequence
  Synthetic oligonucleotide
tacttcattatctaaggata

SEQ ID NO: 2446 - DNA, 20 bp, Artificial sequence
  Synthetic oligonucleotide
gtccggtttttaacagaggt

SEQ ID NO: 2447 - DNA, 20 bp, Artificial sequence
  Synthetic oligonucleotide
gggcatgtaaactcaaggac

SEQ ID NO: 2448 - DNA, 20 bp, Artificial sequence
  Synthetic oligonucleotide
gctccataaaaatcatttga

SEQ ID NO: 2449 - DNA, 20 bp, Artificial sequence
  Synthetic oligonucleotide
cctcatacaatttccctccc

SEQ ID NO: 2450 - DNA, 20 bp, Artificial sequence
  Synthetic oligonucleotide
atacctgttttaacatccaa

SEQ ID NO: 2451 - DNA, 20 bp, Artificial sequence
  Synthetic oligonucleotide
agaaccgtcactcttcaaca

SEQ ID NO: 2452 - DNA, 20 bp, Artificial sequence
  Synthetic oligonucleotide
atctaccttattacaccatt

SEQ ID NO: 2453 - DNA, 20 bp, Artificial sequence
  Synthetic oligonucleotide
gcagacaccacctaactctc

SEQ ID NO: 2454 - DNA, 20 bp, Artificial sequence
  Synthetic oligonucleotide
ccctagtttacttttaagta

SEQ ID NO: 2455 - DNA, 20 bp, Artificial sequence
  Synthetic oligonucleotide
tcaactttattactatagaa

SEQ ID NO: 2456 - DNA, 20 bp, Artificial sequence
  Synthetic oligonucleotide
cttgttggtttcaaatactc

SEQ ID NO: 2457 - DNA, 20 bp, Artificial sequence
  Synthetic oligonucleotide
ccaagtccatctgattccac

SEQ ID NO: 2458 - DNA, 20 bp, Artificial sequence
  Synthetic oligonucleotide
tgggctgtatactaacggta

SEQ ID NO: 2459 - DNA, 20 bp, Artificial sequence
  Synthetic oligonucleotide
gcaacataaattcttattat

SEQ ID NO: 2460 - DNA, 20 bp, Artificial sequence
  Synthetic oligonucleotide
atttacttttacccacacaa

SEQ ID NO: 2461 - DNA, 20 bp, Artificial sequence
  Synthetic oligonucleotide
ctgttctttcatccttgtta

SEQ ID NO: 2462 - DNA, 20 bp, Artificial sequence
  Synthetic oligonucleotide
cagtcagaacttttacagct

SEQ ID NO: 2463 - DNA, 20 bp, Artificial sequence
  Synthetic oligonucleotide
ccagcatacacctgtagggc

SEQ ID NO: 2464 - DNA, 20 bp, Artificial sequence
  Synthetic oligonucleotide
aaccagttcatcaaagagat

SEQ ID NO: 2465 - DNA, 20 bp, Artificial sequence
  Synthetic oligonucleotide
acaatttttccacagggcca

SEQ ID NO: 2466 - DNA, 20 bp, Artificial sequence
  Synthetic oligonucleotide
gcagtgagtcccttaaacct

SEQ ID NO: 2467 - DNA, 20 bp, Artificial sequence
  Synthetic oligonucleotide
tgtcagcattttacttccct

SEQ ID NO: 2468 - DNA, 20 bp, Artificial sequence
  Synthetic oligonucleotide
tatcatattttaacctagga

SEQ ID NO: 2469 - DNA, 20 bp, Artificial sequence
  Synthetic oligonucleotide
tggcattcatttcccacagc

SEQ ID NO: 2470 - DNA, 20 bp, Artificial sequence
  Synthetic oligonucleotide
gcaaatctaaaacctgcttc

SEQ ID NO: 2471 - DNA, 20 bp, Artificial sequence
  Synthetic oligonucleotide
actcatttccaccttcagct

SEQ ID NO: 2472 - DNA, 20 bp, Artificial sequence
  Synthetic oligonucleotide
gcttgttacatattatctta

SEQ ID NO: 2473 - DNA, 20 bp, Artificial sequence
  Synthetic oligonucleotide
tcattagttattattattcc

SEQ ID NO: 2474 - DNA, 20 bp, Artificial sequence
  Synthetic oligonucleotide
aagttgaaatacatgcttca

SEQ ID NO: 2475 - DNA, 20 bp, Artificial sequence
  Synthetic oligonucleotide
gtccatacattatactttct

SEQ ID NO: 2476 - DNA, 20 bp, Artificial sequence
  Synthetic oligonucleotide
tgcaaactgcctccactcac

SEQ ID NO: 2477 - DNA, 20 bp, Artificial sequence
  Synthetic oligonucleotide
caaagagatttacaatcctt

SEQ ID NO: 2478 - DNA, 20 bp, Artificial sequence
  Synthetic oligonucleotide
accttattacaccatttcac

SEQ ID NO: 2479 - DNA, 20 bp, Artificial sequence
  Synthetic oligonucleotide
tcttacttttccattcaatc

SEQ ID NO: 2480 - DNA, 20 bp, Artificial sequence
  Synthetic oligonucleotide
cttgttattctatcttagcc

SEQ ID NO: 2481 - DNA, 20 bp, Artificial sequence
  Synthetic oligonucleotide
aggaccactttctctctctt

SEQ ID NO: 2482 - DNA, 20 bp, Artificial sequence
  Synthetic oligonucleotide
ggcaaaaaacttcaatcaac

SEQ ID NO: 2483 - DNA, 20 bp, Artificial sequence
  Synthetic oligonucleotide
gagcacattttacacacaga

SEQ ID NO: 2484 - DNA, 20 bp, Artificial sequence
  Synthetic oligonucleotide
tttttgtttttactagctcc

SEQ ID NO: 2485 - DNA, 20 bp, Artificial sequence
  Synthetic oligonucleotide
ggttgaccaaaataatcaaa

SEQ ID NO: 2486 - DNA, 20 bp, Artificial sequence
  Synthetic oligonucleotide
gtagggaccagaactcctaa

SEQ ID NO: 2487 - DNA, 20 bp, Artificial sequence
  Synthetic oligonucleotide
aagcattaactttactggca

SEQ ID NO: 2488 - DNA, 20 bp, Artificial sequence
  Synthetic oligonucleotide
gctgaggtttctacttttct

SEQ ID NO: 2489 - DNA, 20 bp, Artificial sequence
  Synthetic oligonucleotide
agaacatccatttcccatta

SEQ ID NO: 2490 - DNA, 20 bp, Artificial sequence
  Synthetic oligonucleotide
agttatctattcctaagcta

SEQ ID NO: 2491 - DNA, 20 bp, Artificial sequence
  Synthetic oligonucleotide
tccatacattatactttctt

SEQ ID NO: 2492 - DNA, 20 bp, Artificial sequence
  Synthetic oligonucleotide
ggaatgcttttactagggca

SEQ ID NO: 2493 - DNA, 20 bp, Artificial sequence
  Synthetic oligonucleotide
accgtcactcttcaacacac

SEQ ID NO: 2494 - DNA, 20 bp, Artificial sequence
  Synthetic oligonucleotide
tagttctacacctcattcat

SEQ ID NO: 2495 - DNA, 20 bp, Artificial sequence
  Synthetic oligonucleotide
tgcatattttatctacctct

SEQ ID NO: 2496 - DNA, 20 bp, Artificial sequence
  Synthetic oligonucleotide
aagtaatatttacaggctcc

SEQ ID NO: 2497 - DNA, 20 bp, Artificial sequence
  Synthetic oligonucleotide
catgaagttattcctgcttc

SEQ ID NO: 2498 - DNA, 20 bp, Artificial sequence
  Synthetic oligonucleotide
gctctaatcctccagtgaca

SEQ ID NO: 2499 - DNA, 20 bp, Artificial sequence
  Synthetic oligonucleotide
cacgacagttccaacataca

SEQ ID NO: 2500 - DNA, 20 bp, Artificial sequence
  Synthetic oligonucleotide
gtcagaacttttacagctgt

SEQ ID NO: 2501 - DNA, 20 bp, Artificial sequence
  Synthetic oligonucleotide
cctgttttaacatccaatca

SEQ ID NO: 2502 - DNA, 20 bp, Artificial sequence
  Synthetic oligonucleotide
agcttgagtttctataacaa

SEQ ID NO: 2503 - DNA, 20 bp, Artificial sequence
  Synthetic oligonucleotide
actacatctattcctaagca

SEQ ID NO: 2504 - DNA, 20 bp, Artificial sequence
  Synthetic oligonucleotide
cacttgcttttctattgtct

SEQ ID NO: 2505 - DNA, 20 bp, Artificial sequence
  Synthetic oligonucleotide
tatctctaccatctacttgc

SEQ ID NO: 2506 - DNA, 20 bp, Artificial sequence
  Synthetic oligonucleotide
atacatatcaatataagcaa

SEQ ID NO: 2507 - DNA, 20 bp, Artificial sequence
  Synthetic oligonucleotide
gtagagtacattaaccgcta

SEQ ID NO: 2508 - DNA, 20 bp, Artificial sequence
  Synthetic oligonucleotide
catacgctcacacatgagca

SEQ ID NO: 2509 - DNA, 20 bp, Artificial sequence
  Synthetic oligonucleotide
gacacatcccatcactagtt

SEQ ID NO: 2510 - DNA, 20 bp, Artificial sequence
  Synthetic oligonucleotide
cttatgactttcttgggttc

SEQ ID NO: 2511 - DNA, 20 bp, Artificial sequence
  Synthetic oligonucleotide
ctgttttcatttctcagcac

SEQ ID NO: 2512 - DNA, 20 bp, Artificial sequence
  Synthetic oligonucleotide
ttcctataatatattccaac

SEQ ID NO: 2513 - DNA, 20 bp, Artificial sequence
  Synthetic oligonucleotide
gacacaatcattaccaacat

SEQ ID NO: 2514 - DNA, 20 bp, Artificial sequence
  Synthetic oligonucleotide
aaatgggttctcttactcta

SEQ ID NO: 2515 - DNA, 20 bp, Artificial sequence
  Synthetic oligonucleotide
ggccatggaccaataccgct

SEQ ID NO: 2516 - DNA, 20 bp, Artificial sequence
  Synthetic oligonucleotide
atcttaattttacctttaca

SEQ ID NO: 2517 - DNA, 20 bp, Artificial sequence
  Synthetic oligonucleotide
attgatttcaatccacacgg

SEQ ID NO: 2518 - DNA, 20 bp, Artificial sequence
  Synthetic oligonucleotide
gtcaaattcacatagggttg

SEQ ID NO: 2519 - DNA, 20 bp, Artificial sequence
  Synthetic oligonucleotide
ccaacagtccctaatgggat

SEQ ID NO: 2520 - DNA, 20 bp, Artificial sequence
  Synthetic oligonucleotide
gcacctccaaaccatacatc

SEQ ID NO: 2521 - DNA, 20 bp, Artificial sequence
  Synthetic oligonucleotide
gtaatttctaaatctgcaac

SEQ ID NO: 2522 - DNA, 20 bp, Artificial sequence
  Synthetic oligonucleotide
gaacagaatcatacacagta

SEQ ID NO: 2523 - DNA, 20 bp, Artificial sequence
  Synthetic oligonucleotide
aggcaatttttcatcccata

SEQ ID NO: 2524 - DNA, 20 bp, Artificial sequence
  Synthetic oligonucleotide
tagtatatattaccaggtca

SEQ ID NO: 2525 - DNA, 20 bp, Artificial sequence
  Synthetic oligonucleotide
gggtgacacctataacctca

SEQ ID NO: 2526 - DNA, 20 bp, Artificial sequence
  Synthetic oligonucleotide
gcactatatacaactattct

SEQ ID NO: 2527 - DNA, 20 bp, Artificial sequence
  Synthetic oligonucleotide
ttagttattattattccatt

SEQ ID NO: 2528 - DNA, 20 bp, Artificial sequence
  Synthetic oligonucleotide
agtccatctatactatgacc

SEQ ID NO: 2529 - DNA, 20 bp, Artificial sequence
  Synthetic oligonucleotide
ctcatacaatttccctccca

SEQ ID NO: 2530 - DNA, 20 bp, Artificial sequence
  Synthetic oligonucleotide
acaaggtgcacactttgctc

SEQ ID NO: 2531 - DNA, 20 bp, Artificial sequence
  Synthetic oligonucleotide
cttacaatatgaacaggtta

SEQ ID NO: 2532 - DNA, 20 bp, Artificial sequence
  Synthetic oligonucleotide
tgctgtattttaattgatct

SEQ ID NO: 2533 - DNA, 20 bp, Artificial sequence
  Synthetic oligonucleotide
tgtcaagaccatacttacgg

SEQ ID NO: 2534 - DNA, 20 bp, Artificial sequence
  Synthetic oligonucleotide
ccagaaccacatttacttta

SEQ ID NO: 2535 - DNA, 20 bp, Artificial sequence
  Synthetic oligonucleotide
acatcttaacatctgactca

SEQ ID NO: 2536 - DNA, 20 bp, Artificial sequence
  Synthetic oligonucleotide
gtacacactttcttctcgca

SEQ ID NO: 2537 - DNA, 20 bp, Artificial sequence
  Synthetic oligonucleotide
gttttatgacaaactgccaa

SEQ ID NO: 2538 - DNA, 20 bp, Artificial sequence
  Synthetic oligonucleotide
tagtttacttttaagtatca

SEQ ID NO: 2539 - DNA, 20 bp, Artificial sequence
  Synthetic oligonucleotide
gactacattttcacaatata

SEQ ID NO: 2540 - DNA, 20 bp, Artificial sequence
  Synthetic oligonucleotide
gccacaccactctacaggtc

SEQ ID NO: 2541 - DNA, 20 bp, Artificial sequence
  Synthetic oligonucleotide
agggtcactatttctggaca

SEQ ID NO: 2542 - DNA, 20 bp, Artificial sequence
  Synthetic oligonucleotide
actagcagattatatcacaa

SEQ ID NO: 2543 - DNA, 20 bp, Artificial sequence
  Synthetic oligonucleotide
catgtgagctttatagtatc

SEQ ID NO: 2544 - DNA, 20 bp, Artificial sequence
  Synthetic oligonucleotide
aaggaactcatccatttcat

SEQ ID NO: 2545 - DNA, 20 bp, Artificial sequence
  Synthetic oligonucleotide
ggatctcacactatgatgcc

SEQ ID NO: 2546 - DNA, 20 bp, Artificial sequence
  Synthetic oligonucleotide
tcatggtaatttaattaaga

SEQ ID NO: 2547 - DNA, 20 bp, Artificial sequence
  Synthetic oligonucleotide
gatctgtttataataggctc

SEQ ID NO: 2548 - DNA, 20 bp, Artificial sequence
  Synthetic oligonucleotide
ggtcacatttataaaacagc

SEQ ID NO: 2549 - DNA, 20 bp, Artificial sequence
  Synthetic oligonucleotide
catgaagaaatattacacta

SEQ ID NO: 2550 - DNA, 20 bp, Artificial sequence
  Synthetic oligonucleotide
ctccagtttcctctctagca

SEQ ID NO: 2551 - DNA, 20 bp, Artificial sequence
  Synthetic oligonucleotide
acccagacccttgaatccct

SEQ ID NO: 2552 - DNA, 20 bp, Artificial sequence
  Synthetic oligonucleotide
ggcattcatttcccacagct

SEQ ID NO: 2553 - DNA, 20 bp, Artificial sequence
  Synthetic oligonucleotide
gaccagaactcctaagagga

SEQ ID NO: 2554 - DNA, 20 bp, Artificial sequence
  Synthetic oligonucleotide
agttctacacctcattcatt

SEQ ID NO: 2555 - DNA, 20 bp, Artificial sequence
  Synthetic oligonucleotide
gcattcatttcccacagctc

SEQ ID NO: 2556 - DNA, 20 bp, Artificial sequence
  Synthetic oligonucleotide
gtcacatttataaaacagct

SEQ ID NO: 2557 - DNA, 20 bp, Artificial sequence
  Synthetic oligonucleotide
actgagttaattataatcta

SEQ ID NO: 2558 - DNA, 20 bp, Artificial sequence
  Synthetic oligonucleotide
gctacacacccacatcccta

SEQ ID NO: 2559 - DNA, 20 bp, Artificial sequence
  Synthetic oligonucleotide
tttggatgaacattacctct

SEQ ID NO: 2560 - DNA, 20 bp, Artificial sequence
  Synthetic oligonucleotide
gtcaagaccatacttacgga

SEQ ID NO: 2561 - DNA, 20 bp, Artificial sequence
  Synthetic oligonucleotide
tcttaattttacctttacat

SEQ ID NO: 2562 - DNA, 20 bp, Artificial sequence
  Synthetic oligonucleotide
ctgttttaacatccaatcac

SEQ ID NO: 2563 - DNA, 20 bp, Artificial sequence
  Synthetic oligonucleotide
atacatgtcaatttctgctc

SEQ ID NO: 2564 - DNA, 20 bp, Artificial sequence
  Synthetic oligonucleotide
tcccaacaaaatcttcactc

SEQ ID NO: 2565 - DNA, 20 bp, Artificial sequence
  Synthetic oligonucleotide
gcattaactttactggcaac

SEQ ID NO: 2566 - DNA, 20 bp, Artificial sequence
  Synthetic oligonucleotide
ggttctcttactctaatcta

SEQ ID NO: 2567 - DNA, 20 bp, Artificial sequence
  Synthetic oligonucleotide
gttctgggtttaactgcaac

SEQ ID NO: 2568 - DNA, 20 bp, Artificial sequence
  Synthetic oligonucleotide
acatccatttcccattattc

SEQ ID NO: 2569 - DNA, 20 bp, Artificial sequence
  Synthetic oligonucleotide
acgacagttccaacatacat

SEQ ID NO: 2570 - DNA, 20 bp, Artificial sequence
  Synthetic oligonucleotide
aagaaattcctttctccact

SEQ ID NO: 2571 - DNA, 20 bp, Artificial sequence
  Synthetic oligonucleotide
cctataatatattccaactt

SEQ ID NO: 2572 - DNA, 20 bp, Artificial sequence
  Synthetic oligonucleotide
agcacattttacacacagaa

SEQ ID NO: 2573 - DNA, 20 bp, Artificial sequence
  Synthetic oligonucleotide
gccatggaccaataccgctc

SEQ ID NO: 2574 - DNA, 20 bp, Artificial sequence
  Synthetic oligonucleotide
actacattttcacaatatac

SEQ ID NO: 2575 - DNA, 20 bp, Artificial sequence
  Synthetic oligonucleotide
gttatctattcctaagctac

SEQ ID NO: 2576 - DNA, 20 bp, Artificial sequence
  Synthetic oligonucleotide
ttgttgtttaatttgtgtaa

SEQ ID NO: 2577 - DNA, 20 bp, Artificial sequence
  Synthetic oligonucleotide
tgtgaacttttaacatacca

SEQ ID NO: 2578 - DNA, 20 bp, Artificial sequence
  Synthetic oligonucleotide
agtgacatcccatctcactc

SEQ ID NO: 2579 - DNA, 20 bp, Artificial sequence
  Synthetic oligonucleotide
ctgccggtcatcctttactc

SEQ ID NO: 2580 - DNA, 20 bp, Artificial sequence
  Synthetic oligonucleotide
aggaagatattttaattatt

SEQ ID NO: 2581 - DNA, 20 bp, Artificial sequence
  Synthetic oligonucleotide
gccgtactatattatattcc

SEQ ID NO: 2582 - DNA, 20 bp, Artificial sequence
  Synthetic oligonucleotide
ttacttttccattcaatctg

SEQ ID NO: 2583 - DNA, 20 bp, Artificial sequence
  Synthetic oligonucleotide
atacgctcacacatgagcac

SEQ ID NO: 2584 - DNA, 20 bp, Artificial sequence
  Synthetic oligonucleotide
ttattattattccattgctt

SEQ ID NO: 2585 - DNA, 20 bp, Artificial sequence
  Synthetic oligonucleotide
ccatacattatactttctta

SEQ ID NO: 2586 - DNA, 20 bp, Artificial sequence
  Synthetic oligonucleotide
tagcagagttcatataatca

SEQ ID NO: 2587 - DNA, 20 bp, Artificial sequence
  Synthetic oligonucleotide
catcccataatttttcatcc

SEQ ID NO: 2588 - DNA, 20 bp, Artificial sequence
  Synthetic oligonucleotide
ctacatctattcctaagcat

SEQ ID NO: 2589 - DNA, 20 bp, Artificial sequence
  Synthetic oligonucleotide
accaaaataatcaaatacta

SEQ ID NO: 2590 - DNA, 20 bp, Artificial sequence
  Synthetic oligonucleotide
tacacagtatttcacaaaca

SEQ ID NO: 2591 - DNA, 20 bp, Artificial sequence
  Synthetic oligonucleotide
agaaccacatttactttata

SEQ ID NO: 2592 - DNA, 20 bp, Artificial sequence
  Synthetic oligonucleotide
tcatctgtttctaaaccagt

SEQ ID NO: 2593 - DNA, 20 bp, Artificial sequence
  Synthetic oligonucleotide
tttacaatccttatcgacca

SEQ ID NO: 2594 - DNA, 20 bp, Artificial sequence
  Synthetic oligonucleotide
tccaaaccatacatcagaaa

SEQ ID NO: 2595 - DNA, 20 bp, Artificial sequence
  Synthetic oligonucleotide
tacacactttcttctcgcaa

SEQ ID NO: 2596 - DNA, 20 bp, Artificial sequence
  Synthetic oligonucleotide
ctgcttgttcccatatgaga

SEQ ID NO: 2597 - DNA, 20 bp, Artificial sequence
  Synthetic oligonucleotide
agctacccagacatttgggc

SEQ ID NO: 2598 - DNA, 20 bp, Artificial sequence
  Synthetic oligonucleotide
gggacattatgaactgcatt

SEQ ID NO: 2599 - DNA, 20 bp, Artificial sequence
  Synthetic oligonucleotide
tactccattaatattttcca

SEQ ID NO: 2600 - DNA, 20 bp, Artificial sequence
  Synthetic oligonucleotide
aggatttgccatcattgtta

SEQ ID NO: 2601 - DNA, 20 bp, Artificial sequence
  Synthetic oligonucleotide
ccttgtcattttctttctct

SEQ ID NO: 2602 - DNA, 20 bp, Artificial sequence
  Synthetic oligonucleotide
ccagtactataaaatgtcca

SEQ ID NO: 2603 - DNA, 20 bp, Artificial sequence
  Synthetic oligonucleotide
catggtaatttaattaagaa

SEQ ID NO: 2604 - DNA, 20 bp, Artificial sequence
  Synthetic oligonucleotide
tctctaccatctacttgcca

SEQ ID NO: 2605 - DNA, 20 bp, Artificial sequence
  Synthetic oligonucleotide
tagcagattatatcacaaac

SEQ ID NO: 2606 - DNA, 20 bp, Artificial sequence
  Synthetic oligonucleotide
acactaaattctttagattc

SEQ ID NO: 2607 - DNA, 20 bp, Artificial sequence
  Synthetic oligonucleotide
actaagcaaatttatcactc

SEQ ID NO: 2608 - DNA, 20 bp, Artificial sequence
  Synthetic oligonucleotide
ttgtatacacatacatggga

SEQ ID NO: 2609 - DNA, 20 bp, Artificial sequence
  Synthetic oligonucleotide
gttggcactattcttatcct

SEQ ID NO: 2610 - DNA, 20 bp, Artificial sequence
  Synthetic oligonucleotide
tatacaactattctacttca

SEQ ID NO: 2611 - DNA, 20 bp, Artificial sequence
  Synthetic oligonucleotide
acagcaagacttccatttct

SEQ ID NO: 2612 - DNA, 20 bp, Artificial sequence
  Synthetic oligonucleotide
gcttgagtttctataacaaa

SEQ ID NO: 2613 - DNA, 20 bp, Artificial sequence
  Synthetic oligonucleotide
ctgtgaatcactacttgtct

SEQ ID NO: 2614 - DNA, 20 bp, Artificial sequence
  Synthetic oligonucleotide
cctgagttcacatgccacaa

SEQ ID NO: 2615 - DNA, 20 bp, Artificial sequence
  Synthetic oligonucleotide
atccatttcatctataagtt

SEQ ID NO: 2616 - DNA, 20 bp, Artificial sequence
  Synthetic oligonucleotide
tttaactttcattatcatca

SEQ ID NO: 2617 - DNA, 20 bp, Artificial sequence
  Synthetic oligonucleotide
ccttattacaccatttcaca

SEQ ID NO: 2618 - DNA, 20 bp, Artificial sequence
  Synthetic oligonucleotide
ggagacatccttcatttctc

SEQ ID NO: 2619 - DNA, 20 bp, Artificial sequence
  Synthetic oligonucleotide
gcagcattttaaactcctgt

SEQ ID NO: 2620 - DNA, 20 bp, Artificial sequence
  Synthetic oligonucleotide
tcatacaatttccctcccat

SEQ ID NO: 2621 - DNA, 20 bp, Artificial sequence
  Synthetic oligonucleotide
tggcacagtcatcttcccgc

SEQ ID NO: 2622 - DNA, 20 bp, Artificial sequence
  Synthetic oligonucleotide
gcaaaaaacttcaatcaact

SEQ ID NO: 2623 - DNA, 20 bp, Artificial sequence
  Synthetic oligonucleotide
tacatatcaatataagcaac

SEQ ID NO: 2624 - DNA, 20 bp, Artificial sequence
  Synthetic oligonucleotide
ccaatgtgacctgctaggaa

SEQ ID NO: 2625 - DNA, 20 bp, Artificial sequence
  Synthetic oligonucleotide
gcaattctattttacagact

SEQ ID NO: 2626 - DNA, 20 bp, Artificial sequence
  Synthetic oligonucleotide
cagaagcaaaaatctttcat

SEQ ID NO: 2627 - DNA, 20 bp, Artificial sequence
  Synthetic oligonucleotide
gttttcatttctcagcacct

SEQ ID NO: 2628 - DNA, 20 bp, Artificial sequence
  Synthetic oligonucleotide
catattttatctacctctcc

SEQ ID NO: 2629 - DNA, 20 bp, Artificial sequence
  Synthetic oligonucleotide
gtggacacagtcacttggtc

SEQ ID NO: 2630 - DNA, 20 bp, Artificial sequence
  Synthetic oligonucleotide
ccattcatcttctctcagga

SEQ ID NO: 2631 - DNA, 20 bp, Artificial sequence
  Synthetic oligonucleotide
tcacatttataaaacagctt

SEQ ID NO: 2632 - DNA, 20 bp, Artificial sequence
  Synthetic oligonucleotide
ttatactttcttaacatccc

SEQ ID NO: 2633 - DNA, 20 bp, Artificial sequence
  Synthetic oligonucleotide
tacatgtcaatttctgctct

SEQ ID NO: 2634 - DNA, 20 bp, Artificial sequence
  Synthetic oligonucleotide
tacttttccattcaatctga

SEQ ID NO: 2635 - DNA, 20 bp, Artificial sequence
  Synthetic oligonucleotide
acttcaatcaactcttccta

SEQ ID NO: 2636 - DNA, 20 bp, Artificial sequence
  Synthetic oligonucleotide
gcatggtacctaattattcc

SEQ ID NO: 2637 - DNA, 20 bp, Artificial sequence
  Synthetic oligonucleotide
atggaaccaatttaaggact

SEQ ID NO: 2638 - DNA, 20 bp, Artificial sequence
  Synthetic oligonucleotide
cttgtcattttctttctcta

SEQ ID NO: 2639 - DNA, 20 bp, Artificial sequence
  Synthetic oligonucleotide
ctacacctcattcattcatt

SEQ ID NO: 2640 - DNA, 20 bp, Artificial sequence
  Synthetic oligonucleotide
ccgtactatattatattccc

SEQ ID NO: 2641 - DNA, 20 bp, Artificial sequence
  Synthetic oligonucleotide
tggtaatttaattaagaaca

SEQ ID NO: 2642 - DNA, 20 bp, Artificial sequence
  Synthetic oligonucleotide
cccataatttttcatcccat

SEQ ID NO: 2643 - DNA, 20 bp, Artificial sequence
  Synthetic oligonucleotide
ctctgaccccctcagtgaca

SEQ ID NO: 2644 - DNA, 20 bp, Artificial sequence
  Synthetic oligonucleotide
tggttagttttccttttata

SEQ ID NO: 2645 - DNA, 20 bp, Artificial sequence
  Synthetic oligonucleotide
ccacttaacctttcacaccc

SEQ ID NO: 2646 - DNA, 20 bp, Artificial sequence
  Synthetic oligonucleotide
cgacagttccaacatacatt

SEQ ID NO: 2647 - DNA, 20 bp, Artificial sequence
  Synthetic oligonucleotide
aagctgcacattcaatcagc

SEQ ID NO: 2648 - DNA, 20 bp, Artificial sequence
  Synthetic oligonucleotide
actccattaatattttccag

SEQ ID NO: 2649 - DNA, 20 bp, Artificial sequence
  Synthetic oligonucleotide
ttctttagattcatcatctc

SEQ ID NO: 2650 - DNA, 20 bp, Artificial sequence
  Synthetic oligonucleotide
gggtgaactctttattacta

SEQ ID NO: 2651 - DNA, 20 bp, Artificial sequence
  Synthetic oligonucleotide
cttactctaatctattactt

SEQ ID NO: 2652 - DNA, 20 bp, Artificial sequence
  Synthetic oligonucleotide
agcaaatttatcactcagta

SEQ ID NO: 2653 - DNA, 20 bp, Artificial sequence
  Synthetic oligonucleotide
tgcttgttcccatatgagaa

SEQ ID NO: 2654 - DNA, 20 bp, Artificial sequence
  Synthetic oligonucleotide
gacagctatctttcttggct

SEQ ID NO: 2655 - DNA, 20 bp, Artificial sequence
  Synthetic oligonucleotide
gcacattttacacacagaac

SEQ ID NO: 2656 - DNA, 20 bp, Artificial sequence
  Synthetic oligonucleotide
gcagagttcatataatcaac

SEQ ID NO: 2657 - DNA, 20 bp, Artificial sequence
  Synthetic oligonucleotide
ccttcatttctcttatgatc

SEQ ID NO: 2658 - DNA, 20 bp, Artificial sequence
  Synthetic oligonucleotide
agttgttcataatattacca

SEQ ID NO: 2659 - DNA, 20 bp, Artificial sequence
  Synthetic oligonucleotide
atacccagcatcatgtaggc

SEQ ID NO: 2660 - DNA, 20 bp, Artificial sequence
  Synthetic oligonucleotide
gtagcatttttttaagcttt

SEQ ID NO: 2661 - DNA, 20 bp, Artificial sequence
  Synthetic oligonucleotide
ttccaacttaatgatactga

SEQ ID NO: 2662 - DNA, 20 bp, Artificial sequence
  Synthetic oligonucleotide
gcataaatatacaatgcaga

SEQ ID NO: 2663 - DNA, 20 bp, Artificial sequence
  Synthetic oligonucleotide
acatatcaatataagcaaca

SEQ ID NO: 2664 - DNA, 20 bp, Artificial sequence
  Synthetic oligonucleotide
acacagtatttcacaaacaa

SEQ ID NO: 2665 - DNA, 20 bp, Artificial sequence
  Synthetic oligonucleotide
ccatccccaattcctagctt

SEQ ID NO: 2666 - DNA, 20 bp, Artificial sequence
  Synthetic oligonucleotide
gccttaaatcatctttgcat

SEQ ID NO: 2667 - DNA, 20 bp, Artificial sequence
  Synthetic oligonucleotide
gtgcatggaaatatttccta

SEQ ID NO: 2668 - DNA, 20 bp, Artificial sequence
  Synthetic oligonucleotide
ggcacagtcatcttcccgca

SEQ ID NO: 2669 - DNA, 20 bp, Artificial sequence
  Synthetic oligonucleotide
agttaattataatctagaca

SEQ ID NO: 2670 - DNA, 20 bp, Artificial sequence
  Synthetic oligonucleotide
ccttatcgaccaattttatt

SEQ ID NO: 2671 - DNA, 20 bp, Artificial sequence
  Synthetic oligonucleotide
tgttttaacatccaatcact

SEQ ID NO: 2672 - DNA, 20 bp, Artificial sequence
  Synthetic oligonucleotide
cagattgttttcaaatgaac

SEQ ID NO: 2673 - DNA, 20 bp, Artificial sequence
  Synthetic oligonucleotide
ctgctaaattttcaatataa

SEQ ID NO: 2674 - DNA, 20 bp, Artificial sequence
  Synthetic oligonucleotide
cccaacaaaatcttcactcc

SEQ ID NO: 2675 - DNA, 20 bp, Artificial sequence
  Synthetic oligonucleotide
cctgctaaactttaattctc

SEQ ID NO: 2676 - DNA, 20 bp, Artificial sequence
  Synthetic oligonucleotide
ccaataccgctctgcagcct

SEQ ID NO: 2677 - DNA, 20 bp, Artificial sequence
  Synthetic oligonucleotide
ttcaaggtcacagctggtta

SEQ ID NO: 2678 - DNA, 20 bp, Artificial sequence
  Synthetic oligonucleotide
tacatctattcctaagcatc

SEQ ID NO: 2679 - DNA, 20 bp, Artificial sequence
  Synthetic oligonucleotide
ggatgttgcatttttcccac

SEQ ID NO: 2680 - DNA, 20 bp, Artificial sequence
  Synthetic oligonucleotide
atagaatttgtaatatttca

SEQ ID NO: 2681 - DNA, 20 bp, Artificial sequence
  Synthetic oligonucleotide
cctttctccacttctcatct

SEQ ID NO: 2682 - DNA, 20 bp, Artificial sequence
  Synthetic oligonucleotide
cttgagtttctataacaaaa

SEQ ID NO: 2683 - DNA, 20 bp, Artificial sequence
  Synthetic oligonucleotide
catccatttcccattattca

SEQ ID NO: 2684 - DNA, 20 bp, Artificial sequence
  Synthetic oligonucleotide
ttcacatgccacaaacggca

SEQ ID NO: 2685 - DNA, 20 bp, Artificial sequence
  Synthetic oligonucleotide
gtccagaaaatacaaatctt

SEQ ID NO: 2686 - DNA, 20 bp, Artificial sequence
  Synthetic oligonucleotide
tctttcattattttttaact

SEQ ID NO: 2687 - DNA, 20 bp, Artificial sequence
  Synthetic oligonucleotide
ttggcactattcttatcctc

SEQ ID NO: 2688 - DNA, 20 bp, Artificial sequence
  Synthetic oligonucleotide
tccatcagatatttttccaa

SEQ ID NO: 2689 - DNA, 20 bp, Artificial sequence
  Synthetic oligonucleotide
tcaaatactatctcatgaca

SEQ ID NO: 2690 - DNA, 20 bp, Artificial sequence
  Synthetic oligonucleotide
tcttcagtcacactagctgc

SEQ ID NO: 2691 - DNA, 20 bp, Artificial sequence
  Synthetic oligonucleotide
ccacagttacccaaacaaca

SEQ ID NO: 2692 - DNA, 20 bp, Artificial sequence
  Synthetic oligonucleotide
acatgaagttttaaatgact

SEQ ID NO: 2693 - DNA, 20 bp, Artificial sequence
  Synthetic oligonucleotide
gatgaacattacctctggtt

SEQ ID NO: 2694 - DNA, 20 bp, Artificial sequence
  Synthetic oligonucleotide
cggtcatcctttactcttta

SEQ ID NO: 2695 - DNA, 20 bp, Artificial sequence
  Synthetic oligonucleotide
gtgacatcccatctcactca

SEQ ID NO: 2696 - DNA, 20 bp, Artificial sequence
  Synthetic oligonucleotide
agcagattatatcacaaaca

SEQ ID NO: 2697 - DNA, 20 bp, Artificial sequence
  Synthetic oligonucleotide
cggcatttttcaacatgccg

SEQ ID NO: 2698 - DNA, 20 bp, Artificial sequence
  Synthetic oligonucleotide
gtgtgggttccaccttcatc

SEQ ID NO: 2699 - DNA, 20 bp, Artificial sequence
  Synthetic oligonucleotide
attacaccatttcacatgca

SEQ ID NO: 2700 - DNA, 20 bp, Artificial sequence
  Synthetic oligonucleotide
ggaagatattttaattattg

SEQ ID NO: 2701 - DNA, 20 bp, Artificial sequence
  Synthetic oligonucleotide
ttttacctttacattaccat

SEQ ID NO: 2702 - DNA, 20 bp, Artificial sequence
  Synthetic oligonucleotide
agtgcagacatcctcaggga

SEQ ID NO: 2703 - DNA, 20 bp, Artificial sequence
  Synthetic oligonucleotide
tctgctcttctcacttaacc

SEQ ID NO: 2704 - DNA, 20 bp, Artificial sequence
  Synthetic oligonucleotide
tacaactattctacttcagt

SEQ ID NO: 2705 - DNA, 20 bp, Artificial sequence
  Synthetic oligonucleotide
ttgtaaataaataattacta

SEQ ID NO: 2706 - DNA, 20 bp, Artificial sequence
  Synthetic oligonucleotide
gtcgatgatctctttaaccg

SEQ ID NO: 2707 - DNA, 20 bp, Artificial sequence
  Synthetic oligonucleotide
tgacatcccatctcactcac

SEQ ID NO: 2708 - DNA, 20 bp, Artificial sequence
  Synthetic oligonucleotide
tgctatatcacattatatga

SEQ ID NO: 2709 - DNA, 20 bp, Artificial sequence
  Synthetic oligonucleotide
tgagcacacacacagaggca

SEQ ID NO: 2710 - DNA, 20 bp, Artificial sequence
  Synthetic oligonucleotide
tggaaccaatttaaggacta

SEQ ID NO: 2711 - DNA, 20 bp, Artificial sequence
  Synthetic oligonucleotide
gacaaagcatttccattaca

SEQ ID NO: 2712 - DNA, 20 bp, Artificial sequence
  Synthetic oligonucleotide
acgatattttttgaaattta

SEQ ID NO: 2713 - DNA, 20 bp, Artificial sequence
  Synthetic oligonucleotide
ccaacaaaatcttcactcca

SEQ ID NO: 2714 - DNA, 20 bp, Artificial sequence
  Synthetic oligonucleotide
ctagagtttagaatttgcca

SEQ ID NO: 2715 - DNA, 20 bp, Artificial sequence
  Synthetic oligonucleotide
ttggagtttactatacactc

SEQ ID NO: 2716 - DNA, 20 bp, Artificial sequence
  Synthetic oligonucleotide
tgggatgaataccctcctct

SEQ ID NO: 2717 - DNA, 20 bp, Artificial sequence
  Synthetic oligonucleotide
agctgcacattcaatcagca

SEQ ID NO: 2718 - DNA, 20 bp, Artificial sequence
  Synthetic oligonucleotide
gttgcatttttcccacacct

SEQ ID NO: 2719 - DNA, 20 bp, Artificial sequence
  Synthetic oligonucleotide
ccttagtttatttaattcat

SEQ ID NO: 2720 - DNA, 20 bp, Artificial sequence
  Synthetic oligonucleotide
aggtctcttttcatgaacac

SEQ ID NO: 2721 - DNA, 20 bp, Artificial sequence
  Synthetic oligonucleotide
agatattttaattattgccc

SEQ ID NO: 2722 - DNA, 20 bp, Artificial sequence
  Synthetic oligonucleotide
gcatcaaccatatatatctc

SEQ ID NO: 2723 - DNA, 20 bp, Artificial sequence
  Synthetic oligonucleotide
gctatgtgaaataatcttta

SEQ ID NO: 2724 - DNA, 20 bp, Artificial sequence
  Synthetic oligonucleotide
ccataatttttcatcccatt

SEQ ID NO: 2725 - DNA, 20 bp, Artificial sequence
  Synthetic oligonucleotide
acatgtcaatttctgctctt

SEQ ID NO: 2726 - DNA, 20 bp, Artificial sequence
  Synthetic oligonucleotide
agcaacataaaataattcat

SEQ ID NO: 2727 - DNA, 20 bp, Artificial sequence
  Synthetic oligonucleotide
tgctaaactttaattctctt

SEQ ID NO: 2728 - DNA, 20 bp, Artificial sequence
  Synthetic oligonucleotide
acttttccattcaatctgaa

SEQ ID NO: 2729 - DNA, 20 bp, Artificial sequence
  Synthetic oligonucleotide
tcattttctttctctagaga

SEQ ID NO: 2730 - DNA, 20 bp, Artificial sequence
  Synthetic oligonucleotide
ccagatgtattcataaagcc

SEQ ID NO: 2731 - DNA, 20 bp, Artificial sequence
  Synthetic oligonucleotide
gcaccatttaccttatctgc

SEQ ID NO: 2732 - DNA, 20 bp, Artificial sequence
  Synthetic oligonucleotide
tcgaccaattttatttagat

SEQ ID NO: 2733 - DNA, 20 bp, Artificial sequence
  Synthetic oligonucleotide
tacaccatttcacatgcagc

SEQ ID NO: 2734 - DNA, 20 bp, Artificial sequence
  Synthetic oligonucleotide
tggcactattcttatcctca

SEQ ID NO: 2735 - DNA, 20 bp, Artificial sequence
  Synthetic oligonucleotide
ctctaatctattacttgctt

SEQ ID NO: 2736 - DNA, 20 bp, Artificial sequence
  Synthetic oligonucleotide
cgtactatattatattccca

SEQ ID NO: 2737 - DNA, 20 bp, Artificial sequence
  Synthetic oligonucleotide
tccatttcccattattcaaa

SEQ ID NO: 2738 - DNA, 20 bp, Artificial sequence
  Synthetic oligonucleotide
cagaaatttcatttatactc

SEQ ID NO: 2739 - DNA, 20 bp, Artificial sequence
  Synthetic oligonucleotide
tctttagattcatcatctcc

SEQ ID NO: 2740 - DNA, 20 bp, Artificial sequence
  Synthetic oligonucleotide
gaggcactccacagtgccaa

SEQ ID NO: 2741 - DNA, 20 bp, Artificial sequence
  Synthetic oligonucleotide
acaaatgtactcatctgtca

SEQ ID NO: 2742 - DNA, 20 bp, Artificial sequence
  Synthetic oligonucleotide
acatctattcctaagcatct

SEQ ID NO: 2743 - DNA, 20 bp, Artificial sequence
  Synthetic oligonucleotide
ttgttcataatattaccata

SEQ ID NO: 2744 - DNA, 20 bp, Artificial sequence
  Synthetic oligonucleotide
taggaaggttctattatggc

SEQ ID NO: 2745 - DNA, 20 bp, Artificial sequence
  Synthetic oligonucleotide
gaactctttattactatgga

SEQ ID NO: 2746 - DNA, 20 bp, Artificial sequence
  Synthetic oligonucleotide
tatcagggtttctcttccca

SEQ ID NO: 2747 - DNA, 20 bp, Artificial sequence
  Synthetic oligonucleotide
ctgaaagtccttaaatgagc

SEQ ID NO: 2748 - DNA, 20 bp, Artificial sequence
  Synthetic oligonucleotide
ttctccacttctcatctccc

SEQ ID NO: 2749 - DNA, 20 bp, Artificial sequence
  Synthetic oligonucleotide
ttcattattttttaactgaa

SEQ ID NO: 2750 - DNA, 20 bp, Artificial sequence
  Synthetic oligonucleotide
tctagacattttaaacttct

SEQ ID NO: 2751 - DNA, 20 bp, Artificial sequence
  Synthetic oligonucleotide
ctggtctatcttaaatccat

SEQ ID NO: 2752 - DNA, 20 bp, Artificial sequence
  Synthetic oligonucleotide
atgtaactcaactaacctca

SEQ ID NO: 2753 - DNA, 20 bp, Artificial sequence
  Synthetic oligonucleotide
ttctcacttaacccagtgca

SEQ ID NO: 2754 - DNA, 20 bp, Artificial sequence
  Synthetic oligonucleotide
acttaacctttcacaccccc

SEQ ID NO: 2755 - DNA, 20 bp, Artificial sequence
  Synthetic oligonucleotide
aactgggatctattttctca

SEQ ID NO: 2756 - DNA, 20 bp, Artificial sequence
  Synthetic oligonucleotide
acagtatttcacaaacaaca

SEQ ID NO: 2757 - DNA, 20 bp, Artificial sequence
  Synthetic oligonucleotide
gagaaactgtcaactgacct

SEQ ID NO: 2758 - DNA, 20 bp, Artificial sequence
  Synthetic oligonucleotide
catgaagttttaaatgactt

SEQ ID NO: 2759 - DNA, 20 bp, Artificial sequence
  Synthetic oligonucleotide
aagctccaattttaattgta

SEQ ID NO: 2760 - DNA, 20 bp, Artificial sequence
  Synthetic oligonucleotide
tttgtaatatttcacaatca

SEQ ID NO: 2761 - DNA, 20 bp, Artificial sequence
  Synthetic oligonucleotide
gaccacagaattacaacact

SEQ ID NO: 2762 - DNA, 20 bp, Artificial sequence
  Synthetic oligonucleotide
tgtttctcgactactatgaa

SEQ ID NO: 2763 - DNA, 20 bp, Artificial sequence
  Synthetic oligonucleotide
gttttaacatccaatcacta

SEQ ID NO: 2764 - DNA, 20 bp, Artificial sequence
  Synthetic oligonucleotide
tatgaaattcaaacttcctt

SEQ ID NO: 2765 - DNA, 20 bp, Artificial sequence
  Synthetic oligonucleotide
tgtgggttccaccttcatcc

SEQ ID NO: 2766 - DNA, 20 bp, Artificial sequence
  Synthetic oligonucleotide
gaatctctatctaaacggca

SEQ ID NO: 2767 - DNA, 20 bp, Artificial sequence
  Synthetic oligonucleotide
ctgtacaccattacacaaat

SEQ ID NO: 2768 - DNA, 20 bp, Artificial sequence
  Synthetic oligonucleotide
gccgaaaacaaatctgctct

SEQ ID NO: 2769 - DNA, 20 bp, Artificial sequence
  Synthetic oligonucleotide
tcttcctaatatttaagata

SEQ ID NO: 2770 - DNA, 20 bp, Artificial sequence
  Synthetic oligonucleotide
ggttagttttccttttatat

SEQ ID NO: 2771 - DNA, 20 bp, Artificial sequence
  Synthetic oligonucleotide
gttaagttttatcagaacat

SEQ ID NO: 2772 - DNA, 20 bp, Artificial sequence
  Synthetic oligonucleotide
ggcatttgataaatgagtca

SEQ ID NO: 2773 - DNA, 20 bp, Artificial sequence
  Synthetic oligonucleotide
gaggtcagaaaacatactct

SEQ ID NO: 2774 - DNA, 20 bp, Artificial sequence
  Synthetic oligonucleotide
cacacggttcttactttgat

SEQ ID NO: 2775 - DNA, 20 bp, Artificial sequence
  Synthetic oligonucleotide
gacagttccaacatacattc

SEQ ID NO: 2776 - DNA, 20 bp, Artificial sequence
  Synthetic oligonucleotide
ctattccaattttttacctc

SEQ ID NO: 2777 - DNA, 20 bp, Artificial sequence
  Synthetic oligonucleotide
ggtggtttaaacaataagca

SEQ ID NO: 2778 - DNA, 20 bp, Artificial sequence
  Synthetic oligonucleotide
tgcaaaggaaattccaggct

SEQ ID NO: 2779 - DNA, 20 bp, Artificial sequence
  Synthetic oligonucleotide
gcagcacaaaataaaaacat

SEQ ID NO: 2780 - DNA, 20 bp, Artificial sequence
  Synthetic oligonucleotide
gatgaaactcacctgtgata

SEQ ID NO: 2781 - DNA, 20 bp, Artificial sequence
  Synthetic oligonucleotide
gaggctactttaaaatactc

SEQ ID NO: 2782 - DNA, 20 bp, Artificial sequence
  Synthetic oligonucleotide
actactagaattattcagat

SEQ ID NO: 2783 - DNA, 20 bp, Artificial sequence
  Synthetic oligonucleotide
ccatcatttcctccctcccc

SEQ ID NO: 2784 - DNA, 20 bp, Artificial sequence
  Synthetic oligonucleotide
ttgcatttttcccacacctc

SEQ ID NO: 2785 - DNA, 20 bp, Artificial sequence
  Synthetic oligonucleotide
gaatagcattcttatctgca

SEQ ID NO: 2786 - DNA, 20 bp, Artificial sequence
  Synthetic oligonucleotide
gttttccttttatattcatc

SEQ ID NO: 2787 - DNA, 20 bp, Artificial sequence
  Synthetic oligonucleotide
acagtgtttttcttaacgat

SEQ ID NO: 2788 - DNA, 20 bp, Artificial sequence
  Synthetic oligonucleotide
tggacaaacatttatttcaa

SEQ ID NO: 2789 - DNA, 20 bp, Artificial sequence
  Synthetic oligonucleotide
gctattgtcatacaattcac

SEQ ID NO: 2790 - DNA, 20 bp, Artificial sequence
  Synthetic oligonucleotide
gatattttaattattgccct

SEQ ID NO: 2791 - DNA, 20 bp, Artificial sequence
  Synthetic oligonucleotide
cgaccaattttatttagatg

SEQ ID NO: 2792 - DNA, 20 bp, Artificial sequence
  Synthetic oligonucleotide
tgccacatcatttatttact

SEQ ID NO: 2793 - DNA, 20 bp, Artificial sequence
  Synthetic oligonucleotide
acaccatttcacatgcagca

SEQ ID NO: 2794 - DNA, 20 bp, Artificial sequence
  Synthetic oligonucleotide
tattcagattttcctctcta

SEQ ID NO: 2795 - DNA, 20 bp, Artificial sequence
  Synthetic oligonucleotide
tgccttttcaatttgcatct

SEQ ID NO: 2796 - DNA, 20 bp, Artificial sequence
  Synthetic oligonucleotide
ctttagattcatcatctccc

SEQ ID NO: 2797 - DNA, 20 bp, Artificial sequence
  Synthetic oligonucleotide
gctgcacattcaatcagcac

SEQ ID NO: 2798 - DNA, 20 bp, Artificial sequence
  Synthetic oligonucleotide
tcatttatactcaaacactg

SEQ ID NO: 2799 - DNA, 20 bp, Artificial sequence
  Synthetic oligonucleotide
tcatctgtcatttatttcaa

SEQ ID NO: 2800 - DNA, 20 bp, Artificial sequence
  Synthetic oligonucleotide
cactctgaccccctcagtga

SEQ ID NO: 2801 - DNA, 20 bp, Artificial sequence
  Synthetic oligonucleotide
aactctttattactatggaa

SEQ ID NO: 2802 - DNA, 20 bp, Artificial sequence
  Synthetic oligonucleotide
acctagttatttccttcaac

SEQ ID NO: 2803 - DNA, 20 bp, Artificial sequence
  Synthetic oligonucleotide
gctatatcacattatatgaa

SEQ ID NO: 2804 - DNA, 20 bp, Artificial sequence
  Synthetic oligonucleotide
aggtcagaaaacatactctg

SEQ ID NO: 2805 - DNA, 20 bp, Artificial sequence
  Synthetic oligonucleotide
gcatgacaagcatatcccac

SEQ ID NO: 2806 - DNA, 20 bp, Artificial sequence
  Synthetic oligonucleotide
tcactgtttttcctatcagc

SEQ ID NO: 2807 - DNA, 20 bp, Artificial sequence
  Synthetic oligonucleotide
gatgaattatttcaactctt

SEQ ID NO: 2808 - DNA, 20 bp, Artificial sequence
  Synthetic oligonucleotide
tcattattttttaactgaat

SEQ ID NO: 2809 - DNA, 20 bp, Artificial sequence
  Synthetic oligonucleotide
ggcattaaaaataagcagat

SEQ ID NO: 2810 - DNA, 20 bp, Artificial sequence
  Synthetic oligonucleotide
aaaatgtattcacataggtt

SEQ ID NO: 2811 - DNA, 20 bp, Artificial sequence
  Synthetic oligonucleotide
tctcacagtccaacttagaa

SEQ ID NO: 2812 - DNA, 20 bp, Artificial sequence
  Synthetic oligonucleotide
acaaagttaaatatggctga

SEQ ID NO: 2813 - DNA, 20 bp, Artificial sequence
  Synthetic oligonucleotide
tcaaatgtatattaatcttt

SEQ ID NO: 2814 - DNA, 20 bp, Artificial sequence
  Synthetic oligonucleotide
ctagacattttaaacttctg

SEQ ID NO: 2815 - DNA, 20 bp, Artificial sequence
  Synthetic oligonucleotide
tgtgatagaccaccctcctc

SEQ ID NO: 2816 - DNA, 20 bp, Artificial sequence
  Synthetic oligonucleotide
accacagaattacaacacta

SEQ ID NO: 2817 - DNA, 20 bp, Artificial sequence
  Synthetic oligonucleotide
ggtaactcaacttccaggaa

SEQ ID NO: 2818 - DNA, 20 bp, Artificial sequence
  Synthetic oligonucleotide
cacaaagcttcacagcatcc

SEQ ID NO: 2819 - DNA, 20 bp, Artificial sequence
  Synthetic oligonucleotide
aagttttttttaaaatcctt

SEQ ID NO: 2820 - DNA, 20 bp, Artificial sequence
  Synthetic oligonucleotide
acaccattacacaaatacaa

SEQ ID NO: 2821 - DNA, 20 bp, Artificial sequence
  Synthetic oligonucleotide
cagatgtattcataaagcct

SEQ ID NO: 2822 - DNA, 20 bp, Artificial sequence
  Synthetic oligonucleotide
agataatttcattaatcacc

SEQ ID NO: 2823 - DNA, 20 bp, Artificial sequence
  Synthetic oligonucleotide
ccatatatatctcctagagt

SEQ ID NO: 2824 - DNA, 20 bp, Artificial sequence
  Synthetic oligonucleotide
tctccacttctcatctccca

SEQ ID NO: 2825 - DNA, 20 bp, Artificial sequence
  Synthetic oligonucleotide
ccacgcaccatttctacctg

SEQ ID NO: 2826 - DNA, 20 bp, Artificial sequence
  Synthetic oligonucleotide
aggttaaaaatccattgatc

SEQ ID NO: 2827 - DNA, 20 bp, Artificial sequence
  Synthetic oligonucleotide
catctattcctaagcatcta

SEQ ID NO: 2828 - DNA, 20 bp, Artificial sequence
  Synthetic oligonucleotide
gctgaggcttttcaacaggt

SEQ ID NO: 2829 - DNA, 20 bp, Artificial sequence
  Synthetic oligonucleotide
agacccagttatattcttta

SEQ ID NO: 2830 - DNA, 20 bp, Artificial sequence
  Synthetic oligonucleotide
cgaggcacagtctcaagcct

SEQ ID NO: 2831 - DNA, 20 bp, Artificial sequence
  Synthetic oligonucleotide
gctccattacattcagtcct

SEQ ID NO: 2832 - DNA, 20 bp, Artificial sequence
  Synthetic oligonucleotide
tctatcttaaatccattgta

SEQ ID NO: 2833 - DNA, 20 bp, Artificial sequence
  Synthetic oligonucleotide
ctactttaaaatactcagca

SEQ ID NO: 2834 - DNA, 20 bp, Artificial sequence
  Synthetic oligonucleotide
gaacacaaaaatatatagca

SEQ ID NO: 2835 - DNA, 20 bp, Artificial sequence
  Synthetic oligonucleotide
ttgcttaaaatttattctgc

SEQ ID NO: 2836 - DNA, 20 bp, Artificial sequence
  Synthetic oligonucleotide
ggtacagtcaccaacttcat

SEQ ID NO: 2837 - DNA, 20 bp, Artificial sequence
  Synthetic oligonucleotide
atcagggtttctcttcccaa

SEQ ID NO: 2838 - DNA, 20 bp, Artificial sequence
  Synthetic oligonucleotide
ctggagaatttctaagcaaa

SEQ ID NO: 2839 - DNA, 20 bp, Artificial sequence
  Synthetic oligonucleotide
ttccaattttttacctcagt

SEQ ID NO: 2840 - DNA, 20 bp, Artificial sequence
  Synthetic oligonucleotide
gctaaactttaattctctta

SEQ ID NO: 2841 - DNA, 20 bp, Artificial sequence
  Synthetic oligonucleotide
aatctgaaaaatcgctgcct

SEQ ID NO: 2842 - DNA, 20 bp, Artificial sequence
  Synthetic oligonucleotide
ccatttcccattattcaaaa

SEQ ID NO: 2843 - DNA, 20 bp, Artificial sequence
  Synthetic oligonucleotide
agcaagcacacatcaagcta

SEQ ID NO: 2844 - DNA, 20 bp, Artificial sequence
  Synthetic oligonucleotide
ggaaggttctattatggcac

SEQ ID NO: 2845 - DNA, 20 bp, Artificial sequence
  Synthetic oligonucleotide
cattttctttctctagagac

SEQ ID NO: 2846 - DNA, 20 bp, Artificial sequence
  Synthetic oligonucleotide
ttgtcattaataaaattcta

SEQ ID NO: 2847 - DNA, 20 bp, Artificial sequence
  Synthetic oligonucleotide
acaaagcatttccattacaa

SEQ ID NO: 2848 - DNA, 20 bp, Artificial sequence
  Synthetic oligonucleotide
gaagttttaaatgacttcct

SEQ ID NO: 2849 - DNA, 20 bp, Artificial sequence
  Synthetic oligonucleotide
acagttccaacatacattcc

SEQ ID NO: 2850 - DNA, 20 bp, Artificial sequence
  Synthetic oligonucleotide
actattcttatcctcaccac

SEQ ID NO: 2851 - DNA, 20 bp, Artificial sequence
  Synthetic oligonucleotide
ttaacatccaatcactattt

SEQ ID NO: 2852 - DNA, 20 bp, Artificial sequence
  Synthetic oligonucleotide
cacgagttcaccaatggctg

SEQ ID NO: 2853 - DNA, 20 bp, Artificial sequence
  Synthetic oligonucleotide
ttttcatgaacacctgccgt

SEQ ID NO: 2854 - DNA, 20 bp, Artificial sequence
  Synthetic oligonucleotide
tctgaatgcaacatgcacct

SEQ ID NO: 2855 - DNA, 20 bp, Artificial sequence
  Synthetic oligonucleotide
agagtcatcctccaaggctt

SEQ ID NO: 2856 - DNA, 20 bp, Artificial sequence
  Synthetic oligonucleotide
tccaattttaattgtagcaa

SEQ ID NO: 2857 - DNA, 20 bp, Artificial sequence
  Synthetic oligonucleotide
gtactatattatattcccac

SEQ ID NO: 2858 - DNA, 20 bp, Artificial sequence
  Synthetic oligonucleotide
tcatgtctttctgctgggca

SEQ ID NO: 2859 - DNA, 20 bp, Artificial sequence
  Synthetic oligonucleotide
cccatctcactcacataaat

SEQ ID NO: 2860 - DNA, 20 bp, Artificial sequence
  Synthetic oligonucleotide
tccatttatttccttccttc

SEQ ID NO: 2861 - DNA, 20 bp, Artificial sequence
  Synthetic oligonucleotide
agttatttccttcaactgtg

SEQ ID NO: 2862 - DNA, 20 bp, Artificial sequence
  Synthetic oligonucleotide
actgtttttcctatcagctt

SEQ ID NO: 2863 - DNA, 20 bp, Artificial sequence
  Synthetic oligonucleotide
tctgcagtaaacccacctat

SEQ ID NO: 2864 - DNA, 20 bp, Artificial sequence
  Synthetic oligonucleotide
gcatctagaaaccatctccc

SEQ ID NO: 2865 - DNA, 20 bp, Artificial sequence
  Synthetic oligonucleotide
gtatcatcaattttagccag

SEQ ID NO: 2866 - DNA, 20 bp, Artificial sequence
  Synthetic oligonucleotide
gaagttgattttattgcttc

SEQ ID NO: 2867 - DNA, 20 bp, Artificial sequence
  Synthetic oligonucleotide
gcatttttcccacacctctc

SEQ ID NO: 2868 - DNA, 20 bp, Artificial sequence
  Synthetic oligonucleotide
tctgaataatttgaatgctt

SEQ ID NO: 2869 - DNA, 20 bp, Artificial sequence
  Synthetic oligonucleotide
ctgccatttatataacctca

SEQ ID NO: 2870 - DNA, 20 bp, Artificial sequence
  Synthetic oligonucleotide
ctgtcatttatttcaaggca

SEQ ID NO: 2871 - DNA, 20 bp, Artificial sequence
  Synthetic oligonucleotide
gccacatcatttatttactt

SEQ ID NO: 2872 - DNA, 20 bp, Artificial sequence
  Synthetic oligonucleotide
cctccaaatttaacacagga

SEQ ID NO: 2873 - DNA, 20 bp, Artificial sequence
  Synthetic oligonucleotide
actctgaccccctcagtgac

SEQ ID NO: 2874 - DNA, 20 bp, Artificial sequence
  Synthetic oligonucleotide
cagttccaacatacattcct

SEQ ID NO: 2875 - DNA, 20 bp, Artificial sequence
  Synthetic oligonucleotide
ctatatcacattatatgaac

SEQ ID NO: 2876 - DNA, 20 bp, Artificial sequence
  Synthetic oligonucleotide
cagaacatttttaatcatgc

SEQ ID NO: 2877 - DNA, 20 bp, Artificial sequence
  Synthetic oligonucleotide
gcaagcacacatcaagctaa

SEQ ID NO: 2878 - DNA, 20 bp, Artificial sequence
  Synthetic oligonucleotide
ccattattcaaaactatgct

SEQ ID NO: 2879 - DNA, 20 bp, Artificial sequence
  Synthetic oligonucleotide
tgcttaaaatttattctgca

SEQ ID NO: 2880 - DNA, 20 bp, Artificial sequence
  Synthetic oligonucleotide
tgcacattcaatcagcacct

SEQ ID NO: 2881 - DNA, 20 bp, Artificial sequence
  Synthetic oligonucleotide
gcatttgtcctcccaggtgc

SEQ ID NO: 2882 - DNA, 20 bp, Artificial sequence
  Synthetic oligonucleotide
tcctctctaaatatttaagt

SEQ ID NO: 2883 - DNA, 20 bp, Artificial sequence
  Synthetic oligonucleotide
aactgctattttgaatgcct

SEQ ID NO: 2884 - DNA, 20 bp, Artificial sequence
  Synthetic oligonucleotide
tgttgtatcacacaatttcc

SEQ ID NO: 2885 - DNA, 20 bp, Artificial sequence
  Synthetic oligonucleotide
acacagttcctcacagctgt

SEQ ID NO: 2886 - DNA, 20 bp, Artificial sequence
  Synthetic oligonucleotide
gcagaagtaaacattcattc

SEQ ID NO: 2887 - DNA, 20 bp, Artificial sequence
  Synthetic oligonucleotide
tagacattttaaacttctga

SEQ ID NO: 2888 - DNA, 20 bp, Artificial sequence
  Synthetic oligonucleotide
tccaaggcttcttcttctcc

SEQ ID NO: 2889 - DNA, 20 bp, Artificial sequence
  Synthetic oligonucleotide
gtttaatattttcaggtcta

SEQ ID NO: 2890 - DNA, 20 bp, Artificial sequence
  Synthetic oligonucleotide
tgtatattaatctttggcaa

SEQ ID NO: 2891 - DNA, 20 bp, Artificial sequence
  Synthetic oligonucleotide
caccatttaccttatctgca

SEQ ID NO: 2892 - DNA, 20 bp, Artificial sequence
  Synthetic oligonucleotide
acaaaaatatatagcatcca

SEQ ID NO: 2893 - DNA, 20 bp, Artificial sequence
  Synthetic oligonucleotide
caccatttcacatgcagcat

SEQ ID NO: 2894 - DNA, 20 bp, Artificial sequence
  Synthetic oligonucleotide
ctttttgacatagttaggtt

SEQ ID NO: 2895 - DNA, 20 bp, Artificial sequence
  Synthetic oligonucleotide
gcagttacactcatacagac

SEQ ID NO: 2896 - DNA, 20 bp, Artificial sequence
  Synthetic oligonucleotide
aactgaattttttaacacat

SEQ ID NO: 2897 - DNA, 20 bp, Artificial sequence
  Synthetic oligonucleotide
ggacaaacatttatttcaac

SEQ ID NO: 2898 - DNA, 20 bp, Artificial sequence
  Synthetic oligonucleotide
ccagttatattctttaaggt

SEQ ID NO: 2899 - DNA, 20 bp, Artificial sequence
  Synthetic oligonucleotide
tcatgtcaatgtattactta

SEQ ID NO: 2900 - DNA, 20 bp, Artificial sequence
  Synthetic oligonucleotide
gtctcaagcctacaagactc

SEQ ID NO: 2901 - DNA, 20 bp, Artificial sequence
  Synthetic oligonucleotide
tcaccaacttcatctgtcct

SEQ ID NO: 2902 - DNA, 20 bp, Artificial sequence
  Synthetic oligonucleotide
atcctttaaatttcatgtgc

SEQ ID NO: 2903 - DNA, 20 bp, Artificial sequence
  Synthetic oligonucleotide
ctattgtcatacaattcact

SEQ ID NO: 2904 - DNA, 20 bp, Artificial sequence
  Synthetic oligonucleotide
cgcaccatttctacctggat

SEQ ID NO: 2905 - DNA, 20 bp, Artificial sequence
  Synthetic oligonucleotide
acatccaatcactattttaa

SEQ ID NO: 2906 - DNA, 20 bp, Artificial sequence
  Synthetic oligonucleotide
acagtcacagaatttaccta

SEQ ID NO: 2907 - DNA, 20 bp, Artificial sequence
  Synthetic oligonucleotide
cacacacaacttacttgcaa

SEQ ID NO: 2908 - DNA, 20 bp, Artificial sequence
  Synthetic oligonucleotide
ccaacacattctttctctta

SEQ ID NO: 2909 - DNA, 20 bp, Artificial sequence
  Synthetic oligonucleotide
cagtgtttttcttaacgata

SEQ ID NO: 2910 - DNA, 20 bp, Artificial sequence
  Synthetic oligonucleotide
ttgtctccaatctcagggtc

SEQ ID NO: 2911 - DNA, 20 bp, Artificial sequence
  Synthetic oligonucleotide
tcaaacactgcaacaggcaa

SEQ ID NO: 2912 - DNA, 20 bp, Artificial sequence
  Synthetic oligonucleotide
tataaagtatttcatcctgc

SEQ ID NO: 2913 - DNA, 20 bp, Artificial sequence
  Synthetic oligonucleotide
tcattccaaaaccccatgac

SEQ ID NO: 2914 - DNA, 20 bp, Artificial sequence
  Synthetic oligonucleotide
aagcatttccattacaagta

SEQ ID NO: 2915 - DNA, 20 bp, Artificial sequence
  Synthetic oligonucleotide
ccacttctcatctcccacgg

SEQ ID NO: 2916 - DNA, 20 bp, Artificial sequence
  Synthetic oligonucleotide
ttttccttttatattcatca

SEQ ID NO: 2917 - DNA, 20 bp, Artificial sequence
  Synthetic oligonucleotide
actatattatattcccacca

SEQ ID NO: 2918 - DNA, 20 bp, Artificial sequence
  Synthetic oligonucleotide
acaacacattccctaaggca

SEQ ID NO: 2919 - DNA, 20 bp, Artificial sequence
  Synthetic oligonucleotide
gcaattctcatttttctttt

SEQ ID NO: 2920 - DNA, 20 bp, Artificial sequence
  Synthetic oligonucleotide
actctttattactatggaaa

SEQ ID NO: 2921 - DNA, 20 bp, Artificial sequence
  Synthetic oligonucleotide
gataatttcattaatcacca

SEQ ID NO: 2922 - DNA, 20 bp, Artificial sequence
  Synthetic oligonucleotide
tcctaagcatctacaccact

SEQ ID NO: 2923 - DNA, 20 bp, Artificial sequence
  Synthetic oligonucleotide
caagctctccattaatgatc

SEQ ID NO: 2924 - DNA, 20 bp, Artificial sequence
  Synthetic oligonucleotide
tggttgagttcttaacataa

SEQ ID NO: 2925 - DNA, 20 bp, Artificial sequence
  Synthetic oligonucleotide
gcctcaactatctccaatac

SEQ ID NO: 2926 - DNA, 20 bp, Artificial sequence
  Synthetic oligonucleotide
ctattcttatcctcaccaca

SEQ ID NO: 2927 - DNA, 20 bp, Artificial sequence
  Synthetic oligonucleotide
gggacaagccatcactggca

SEQ ID NO: 2928 - DNA, 20 bp, Artificial sequence
  Synthetic oligonucleotide
gtttattgaattatatctcc

SEQ ID NO: 2929 - DNA, 20 bp, Artificial sequence
  Synthetic oligonucleotide
ctgaggcttttcaacaggtc

SEQ ID NO: 2930 - DNA, 20 bp, Artificial sequence
  Synthetic oligonucleotide
ttattcttttacaaagtatt

SEQ ID NO: 2931 - DNA, 20 bp, Artificial sequence
  Synthetic oligonucleotide
gtaactcaacttccaggaat

SEQ ID NO: 2932 - DNA, 20 bp, Artificial sequence
  Synthetic oligonucleotide
aagcagttcatttcccccat

SEQ ID NO: 2933 - DNA, 20 bp, Artificial sequence
  Synthetic oligonucleotide
atctcactcacataaatgcc

SEQ ID NO: 2934 - DNA, 20 bp, Artificial sequence
  Synthetic oligonucleotide
gccagaagcatttctacccg

SEQ ID NO: 2935 - DNA, 20 bp, Artificial sequence
  Synthetic oligonucleotide
aacacagacactcatacata

SEQ ID NO: 2936 - DNA, 20 bp, Artificial sequence
  Synthetic oligonucleotide
gctccggtcacaacattgtg

SEQ ID NO: 2937 - DNA, 20 bp, Artificial sequence
  Synthetic oligonucleotide
taggtttgtattattatcat

SEQ ID NO: 2938 - DNA, 20 bp, Artificial sequence
  Synthetic oligonucleotide
accaacttcatctgtcctcc

SEQ ID NO: 2939 - DNA, 20 bp, Artificial sequence
  Synthetic oligonucleotide
tgtcatttatttcaaggcac

SEQ ID NO: 2940 - DNA, 20 bp, Artificial sequence
  Synthetic oligonucleotide
acttctcatctcccacggca

SEQ ID NO: 2941 - DNA, 20 bp, Artificial sequence
  Synthetic oligonucleotide
ctcaactatctccaatacac

SEQ ID NO: 2942 - DNA, 20 bp, Artificial sequence
  Synthetic oligonucleotide
ttaggttgaaatctaccatc

SEQ ID NO: 2943 - DNA, 20 bp, Artificial sequence
  Synthetic oligonucleotide
tttcaggtctaacaatggca

SEQ ID NO: 2944 - DNA, 20 bp, Artificial sequence
  Synthetic oligonucleotide
agcacattttttccccctgt

SEQ ID NO: 2945 - DNA, 20 bp, Artificial sequence
  Synthetic oligonucleotide
gcacattcaatcagcacctt

SEQ ID NO: 2946 - DNA, 20 bp, Artificial sequence
  Synthetic oligonucleotide
caccatggtacaacttccta

SEQ ID NO: 2947 - DNA, 20 bp, Artificial sequence
  Synthetic oligonucleotide
gcaacaggcaatacacagta

SEQ ID NO: 2948 - DNA, 20 bp, Artificial sequence
  Synthetic oligonucleotide
caggaggtttctcccgtcct

SEQ ID NO: 2949 - DNA, 20 bp, Artificial sequence
  Synthetic oligonucleotide
actgaattttttaacacatt

SEQ ID NO: 2950 - DNA, 20 bp, Artificial sequence
  Synthetic oligonucleotide
catcatttatttactttgga

SEQ ID NO: 2951 - DNA, 20 bp, Artificial sequence
  Synthetic oligonucleotide
aagttgattttattgcttca

SEQ ID NO: 2952 - DNA, 20 bp, Artificial sequence
  Synthetic oligonucleotide
gacctagtttttctaaatcc

SEQ ID NO: 2953 - DNA, 20 bp, Artificial sequence
  Synthetic oligonucleotide
gcttaaaatttattctgcac

SEQ ID NO: 2954 - DNA, 20 bp, Artificial sequence
  Synthetic oligonucleotide
aatgcttttaatttagagac

SEQ ID NO: 2955 - DNA, 20 bp, Artificial sequence
  Synthetic oligonucleotide
acttgattccaatcattgtt

SEQ ID NO: 2956 - DNA, 20 bp, Artificial sequence
  Synthetic oligonucleotide
aaagtatttcctgcttgctc

SEQ ID NO: 2957 - DNA, 20 bp, Artificial sequence
  Synthetic oligonucleotide
acgatgttgcccaattgctc

SEQ ID NO: 2958 - DNA, 20 bp, Artificial sequence
  Synthetic oligonucleotide
tttgtattattatcatgctt

SEQ ID NO: 2959 - DNA, 20 bp, Artificial sequence
  Synthetic oligonucleotide
ctcagtgacacatacgctca

SEQ ID NO: 2960 - DNA, 20 bp, Artificial sequence
  Synthetic oligonucleotide
actcagtaccagtacctgca

SEQ ID NO: 2961 - DNA, 20 bp, Artificial sequence
  Synthetic oligonucleotide
gtaaacattcattctagatt

SEQ ID NO: 2962 - DNA, 20 bp, Artificial sequence
  Synthetic oligonucleotide
cagacactcatacatattgc

SEQ ID NO: 2963 - DNA, 20 bp, Artificial sequence
  Synthetic oligonucleotide
cctctctaaatatttaagtc

SEQ ID NO: 2964 - DNA, 20 bp, Artificial sequence
  Synthetic oligonucleotide
gtagacactttctggaggac

SEQ ID NO: 2965 - DNA, 20 bp, Artificial sequence
  Synthetic oligonucleotide
atatcacattatatgaacat

SEQ ID NO: 2966 - DNA, 20 bp, Artificial sequence
  Synthetic oligonucleotide
ccaatcactattttaatgtc

SEQ ID NO: 2967 - DNA, 20 bp, Artificial sequence
  Synthetic oligonucleotide
ccttttatattcatcagaac

SEQ ID NO: 2968 - DNA, 20 bp, Artificial sequence
  Synthetic oligonucleotide
agaacatttttaatcatgca

SEQ ID NO: 2969 - DNA, 20 bp, Artificial sequence
  Synthetic oligonucleotide
ccaaggcttcttcttctcct

SEQ ID NO: 2970 - DNA, 20 bp, Artificial sequence
  Synthetic oligonucleotide
gtcacagaatttacctacat

SEQ ID NO: 2971 - DNA, 20 bp, Artificial sequence
  Synthetic oligonucleotide
ctagtttgaatatctcctta

SEQ ID NO: 2972 - DNA, 20 bp, Artificial sequence
  Synthetic oligonucleotide
tacaagactcaccatagtca

SEQ ID NO: 2973 - DNA, 20 bp, Artificial sequence
  Synthetic oligonucleotide
cttcagatacttcaatccta

SEQ ID NO: 2974 - DNA, 20 bp, Artificial sequence
  Synthetic oligonucleotide
tgtcatacaattcacttcta

SEQ ID NO: 2975 - DNA, 20 bp, Artificial sequence
  Synthetic oligonucleotide
agttccaacatacattcctc

SEQ ID NO: 2976 - DNA, 20 bp, Artificial sequence
  Synthetic oligonucleotide
ggcaaacttcaaacacagcc

SEQ ID NO: 2977 - DNA, 20 bp, Artificial sequence
  Synthetic oligonucleotide
tcatgtctttacaactgcat

SEQ ID NO: 2978 - DNA, 20 bp, Artificial sequence
  Synthetic oligonucleotide
cgtgatctactctaacccca

SEQ ID NO: 2979 - DNA, 20 bp, Artificial sequence
  Synthetic oligonucleotide
ccatctcccaattcaactct

SEQ ID NO: 2980 - DNA, 20 bp, Artificial sequence
  Synthetic oligonucleotide
gggcagattaaataaggtca

SEQ ID NO: 2981 - DNA, 20 bp, Artificial sequence
  Synthetic oligonucleotide
ccatcttaaccatttttggc

SEQ ID NO: 2982 - DNA, 20 bp, Artificial sequence
  Synthetic oligonucleotide
gaggagtatcaatcaaccaa

SEQ ID NO: 2983 - DNA, 20 bp, Artificial sequence
  Synthetic oligonucleotide
gccagtcttctctcattcta

SEQ ID NO: 2984 - DNA, 20 bp, Artificial sequence
  Synthetic oligonucleotide
tccttcgacaacacagggca

SEQ ID NO: 2985 - DNA, 20 bp, Artificial sequence
  Synthetic oligonucleotide
tcaacaggtcaatcttcctc

SEQ ID NO: 2986 - DNA, 20 bp, Artificial sequence
  Synthetic oligonucleotide
ccggtcacaacattgtggtc

SEQ ID NO: 2987 - DNA, 20 bp, Artificial sequence
  Synthetic oligonucleotide
tgctgtactttctttttttc

SEQ ID NO: 2988 - DNA, 20 bp, Artificial sequence
  Synthetic oligonucleotide
ttaacgatatttataactgc

SEQ ID NO: 2989 - DNA, 20 bp, Artificial sequence
  Synthetic oligonucleotide
gaagcatttctacccggcga

SEQ ID NO: 2990 - DNA, 20 bp, Artificial sequence
  Synthetic oligonucleotide
tttcacagttttagaggcca

SEQ ID NO: 2991 - DNA, 20 bp, Artificial sequence
  Synthetic oligonucleotide
aacttctgatacattaccaa

SEQ ID NO: 2992 - DNA, 20 bp, Artificial sequence
  Synthetic oligonucleotide
cgtaagttcaccactttact

SEQ ID NO: 2993 - DNA, 20 bp, Artificial sequence
  Synthetic oligonucleotide
gttacactcatacagacaga

SEQ ID NO: 2994 - DNA, 20 bp, Artificial sequence
  Synthetic oligonucleotide
agtaaacccacctataaggc

SEQ ID NO: 2995 - DNA, 20 bp, Artificial sequence
  Synthetic oligonucleotide
tctcactcacataaatgcca

SEQ ID NO: 2996 - DNA, 20 bp, Artificial sequence
  Synthetic oligonucleotide
taagcatctacaccacttcc

SEQ ID NO: 2997 - DNA, 20 bp, Artificial sequence
  Synthetic oligonucleotide
caagatatcctcctcatccc

SEQ ID NO: 2998 - DNA, 20 bp, Artificial sequence
  Synthetic oligonucleotide
tgtcaatgtattacttatgc

SEQ ID NO: 2999 - DNA, 20 bp, Artificial sequence
  Synthetic oligonucleotide
ccatttatataacctcatta

SEQ ID NO: 3000 - DNA, 20 bp, Artificial sequence
  Synthetic oligonucleotide
ctgtacaagctaacttgcaa

SEQ ID NO: 3001 - DNA, 20 bp, Artificial sequence
  Synthetic oligonucleotide
ccaatggtatcctttaacac

SEQ ID NO: 3002 - DNA, 20 bp, Artificial sequence
  Synthetic oligonucleotide
aagaatactttatctcagta

SEQ ID NO: 3003 - DNA, 20 bp, Artificial sequence
  Synthetic oligonucleotide
gcacaggatccacagcctga

SEQ ID NO: 3004 - DNA, 20 bp, Artificial sequence
  Synthetic oligonucleotide
ataaagtatttcatcctgca

SEQ ID NO: 3005 - DNA, 20 bp, Artificial sequence
  Synthetic oligonucleotide
ctgtttttcctatcagcttt

SEQ ID NO: 3006 - DNA, 20 bp, Artificial sequence
  Synthetic oligonucleotide
ccataactaaaattactgtt

SEQ ID NO: 3007 - DNA, 20 bp, Artificial sequence
  Synthetic oligonucleotide
tgtttgtcccaataatatgc

SEQ ID NO: 3008 - DNA, 20 bp, Artificial sequence
  Synthetic oligonucleotide
acaaacatttatttcaacat

SEQ ID NO: 3009 - DNA, 20 bp, Artificial sequence
  Synthetic oligonucleotide
gttgtatcacacaatttcca

SEQ ID NO: 3010 - DNA, 20 bp, Artificial sequence
  Synthetic oligonucleotide
ccaaacgcaactcctggacc

SEQ ID NO: 3011 - DNA, 20 bp, Artificial sequence
  Synthetic oligonucleotide
cctttaaatttcatgtgctt

SEQ ID NO: 3012 - DNA, 20 bp, Artificial sequence
  Synthetic oligonucleotide
cagttatattctttaaggtc

SEQ ID NO: 3013 - DNA, 20 bp, Artificial sequence
  Synthetic oligonucleotide
acacattctttctcttactc

SEQ ID NO: 3014 - DNA, 20 bp, Artificial sequence
  Synthetic oligonucleotide
tgtgttgtccttttataacc

SEQ ID NO: 3015 - DNA, 20 bp, Artificial sequence
  Synthetic oligonucleotide
agaagactcatccttcagtg

SEQ ID NO: 3016 - DNA, 20 bp, Artificial sequence
  Synthetic oligonucleotide
ccaacattccatgaattcca

SEQ ID NO: 3017 - DNA, 20 bp, Artificial sequence
  Synthetic oligonucleotide
tgggtgttttcatattcctt

SEQ ID NO: 3018 - DNA, 20 bp, Artificial sequence
  Synthetic oligonucleotide
gcagcagaaatttcacaagc

SEQ ID NO: 3019 - DNA, 20 bp, Artificial sequence
  Synthetic oligonucleotide
tcaccattttttccccctgt

SEQ ID NO: 3020 - DNA, 20 bp, Artificial sequence
  Synthetic oligonucleotide
ctgaattttttaacacattg

SEQ ID NO: 3021 - DNA, 20 bp, Artificial sequence
  Synthetic oligonucleotide
gtcatacaattcacttctac

SEQ ID NO: 3022 - DNA, 20 bp, Artificial sequence
  Synthetic oligonucleotide
tcacagaatttacctacatt

SEQ ID NO: 3023 - DNA, 20 bp, Artificial sequence
  Synthetic oligonucleotide
gcaaacttcaaacacagcct

SEQ ID NO: 3024 - DNA, 20 bp, Artificial sequence
  Synthetic oligonucleotide
gttccaacatacattcctct

SEQ ID NO: 3025 - DNA, 20 bp, Artificial sequence
  Synthetic oligonucleotide
gcacctttatttcagaactc

SEQ ID NO: 3026 - DNA, 20 bp, Artificial sequence
  Synthetic oligonucleotide
cagtgcagttcacattcaat

SEQ ID NO: 3027 - DNA, 20 bp, Artificial sequence
  Synthetic oligonucleotide
aatggtatcctttaacacgc

SEQ ID NO: 3028 - DNA, 20 bp, Artificial sequence
  Synthetic oligonucleotide
tgccaatatctttattccat

SEQ ID NO: 3029 - DNA, 20 bp, Artificial sequence
  Synthetic oligonucleotide
gcattactttttacaatgga

SEQ ID NO: 3030 - DNA, 20 bp, Artificial sequence
  Synthetic oligonucleotide
acctagtttttctaaatcct

SEQ ID NO: 3031 - DNA, 20 bp, Artificial sequence
  Synthetic oligonucleotide
aacgatatttataactgctc

SEQ ID NO: 3032 - DNA, 20 bp, Artificial sequence
  Synthetic oligonucleotide
gtaaacccacctataaggca

SEQ ID NO: 3033 - DNA, 20 bp, Artificial sequence
  Synthetic oligonucleotide
caatcactattttaatgtca

SEQ ID NO: 3034 - DNA, 20 bp, Artificial sequence
  Synthetic oligonucleotide
acattctttctcttactcta

SEQ ID NO: 3035 - DNA, 20 bp, Artificial sequence
  Synthetic oligonucleotide
cagtgacacatacgctcaca

SEQ ID NO: 3036 - DNA, 20 bp, Artificial sequence
  Synthetic oligonucleotide
agtgtgttcaaccattactt

SEQ ID NO: 3037 - DNA, 20 bp, Artificial sequence
  Synthetic oligonucleotide
aggacatcaaaccatctgcc

SEQ ID NO: 3038 - DNA, 20 bp, Artificial sequence
  Synthetic oligonucleotide
taggttgaaatctaccatca

SEQ ID NO: 3039 - DNA, 20 bp, Artificial sequence
  Synthetic oligonucleotide
cagcagctacgatcttccta

SEQ ID NO: 3040 - DNA, 20 bp, Artificial sequence
  Synthetic oligonucleotide
caccacattccctctggagt

SEQ ID NO: 3041 - DNA, 20 bp, Artificial sequence
  Synthetic oligonucleotide
gtcaatgtattacttatgca

SEQ ID NO: 3042 - DNA, 20 bp, Artificial sequence
  Synthetic oligonucleotide
actgatctcatccttcactg

SEQ ID NO: 3043 - DNA, 20 bp, Artificial sequence
  Synthetic oligonucleotide
ttactgatcactcattccca

SEQ ID NO: 3044 - DNA, 20 bp, Artificial sequence
  Synthetic oligonucleotide
gcctagtaaataatgtacca

SEQ ID NO: 3045 - DNA, 20 bp, Artificial sequence
  Synthetic oligonucleotide
accgaagacattttcattct

SEQ ID NO: 3046 - DNA, 20 bp, Artificial sequence
  Synthetic oligonucleotide
agacacatacttcatatcta

SEQ ID NO: 3047 - DNA, 20 bp, Artificial sequence
  Synthetic oligonucleotide
atcacattatatgaacataa

SEQ ID NO: 3048 - DNA, 20 bp, Artificial sequence
  Synthetic oligonucleotide
gcttcagaaatataacacat

SEQ ID NO: 3049 - DNA, 20 bp, Artificial sequence
  Synthetic oligonucleotide
tggcagaacattctacaacc

SEQ ID NO: 3050 - DNA, 20 bp, Artificial sequence
  Synthetic oligonucleotide
ttgtatcacacaatttccat

SEQ ID NO: 3051 - DNA, 20 bp, Artificial sequence
  Synthetic oligonucleotide
tttgcattcccttcatggca

SEQ ID NO: 3052 - DNA, 20 bp, Artificial sequence
  Synthetic oligonucleotide
cttgattccaatcattgttc

SEQ ID NO: 3053 - DNA, 20 bp, Artificial sequence
  Synthetic oligonucleotide
agacactcatacatattgct

SEQ ID NO: 3054 - DNA, 20 bp, Artificial sequence
  Synthetic oligonucleotide
gtcacagccacttagcagaa

SEQ ID NO: 3055 - DNA, 20 bp, Artificial sequence
  Synthetic oligonucleotide
ggcatgaacacatctcacta

SEQ ID NO: 3056 - DNA, 20 bp, Artificial sequence
  Synthetic oligonucleotide
cttggatcacaaatttcctt

SEQ ID NO: 3057 - DNA, 20 bp, Artificial sequence
  Synthetic oligonucleotide
aggagtatcaatcaaccaat

SEQ ID NO: 3058 - DNA, 20 bp, Artificial sequence
  Synthetic oligonucleotide
caagtgtcatctacacagga

SEQ ID NO: 3059 - DNA, 20 bp, Artificial sequence
  Synthetic oligonucleotide
actatctccaatacacaaca

SEQ ID NO: 3060 - DNA, 20 bp, Artificial sequence
  Synthetic oligonucleotide
gggtaacattttcctacaaa

SEQ ID NO: 3061 - DNA, 20 bp, Artificial sequence
  Synthetic oligonucleotide
agggtcagaatcattgtggc

SEQ ID NO: 3062 - DNA, 20 bp, Artificial sequence
  Synthetic oligonucleotide
ggctgtacaacattacgaat

SEQ ID NO: 3063 - DNA, 20 bp, Artificial sequence
  Synthetic oligonucleotide
gcctcacttcccccattata

SEQ ID NO: 3064 - DNA, 20 bp, Artificial sequence
  Synthetic oligonucleotide
aagtctcacatccataccct

SEQ ID NO: 3065 - DNA, 20 bp, Artificial sequence
  Synthetic oligonucleotide
cttcctactttagacacctc

SEQ ID NO: 3066 - DNA, 20 bp, Artificial sequence
  Synthetic oligonucleotide
tccttagtattaacaagaaa

SEQ ID NO: 3067 - DNA, 20 bp, Artificial sequence
  Synthetic oligonucleotide
gatgagagattcattttcaa

SEQ ID NO: 3068 - DNA, 20 bp, Artificial sequence
  Synthetic oligonucleotide
tccagtttcaacccagagca

SEQ ID NO: 3069 - DNA, 20 bp, Artificial sequence
  Synthetic oligonucleotide
atctcagtaaatacaagctt

SEQ ID NO: 3070 - DNA, 20 bp, Artificial sequence
  Synthetic oligonucleotide
catgtctttacaactgcatt

SEQ ID NO: 3071 - DNA, 20 bp, Artificial sequence
  Synthetic oligonucleotide
caggaagcctttcctgcctc

SEQ ID NO: 3072 - DNA, 20 bp, Artificial sequence
  Synthetic oligonucleotide
atgcttttaatttagagact

SEQ ID NO: 3073 - DNA, 20 bp, Artificial sequence
  Synthetic oligonucleotide
gttttctattttactgactt

SEQ ID NO: 3074 - DNA, 20 bp, Artificial sequence
  Synthetic oligonucleotide
agatacttcaatcctagaca

SEQ ID NO: 3075 - DNA, 20 bp, Artificial sequence
  Synthetic oligonucleotide
aggcacataatataatcagc

SEQ ID NO: 3076 - DNA, 20 bp, Artificial sequence
  Synthetic oligonucleotide
ctctctaaatatttaagtct

SEQ ID NO: 3077 - DNA, 20 bp, Artificial sequence
  Synthetic oligonucleotide
tcccaattcaactcttcacc

SEQ ID NO: 3078 - DNA, 20 bp, Artificial sequence
  Synthetic oligonucleotide
tcaggtctaacaatggcact

SEQ ID NO: 3079 - DNA, 20 bp, Artificial sequence
  Synthetic oligonucleotide
aagcatctacaccacttccc

SEQ ID NO: 3080 - DNA, 20 bp, Artificial sequence
  Synthetic oligonucleotide
aacgacagcattcttgccac

SEQ ID NO: 3081 - DNA, 20 bp, Artificial sequence
  Synthetic oligonucleotide
tcaaatgcacaaattccact

SEQ ID NO: 3082 - DNA, 20 bp, Artificial sequence
  Synthetic oligonucleotide
gtccttttataaccacattc

SEQ ID NO: 3083 - DNA, 20 bp, Artificial sequence
  Synthetic oligonucleotide
ggcagattaaataaggtcaa

SEQ ID NO: 3084 - DNA, 20 bp, Artificial sequence
  Synthetic oligonucleotide
gaccacctcaactctccttc

SEQ ID NO: 3085 - DNA, 20 bp, Artificial sequence
  Synthetic oligonucleotide
ccatggctgcaccataccca

SEQ ID NO: 3086 - DNA, 20 bp, Artificial sequence
  Synthetic oligonucleotide
ttgtattattatcatgctta

SEQ ID NO: 3087 - DNA, 20 bp, Artificial sequence
  Synthetic oligonucleotide
tctctttgaaaccattgctt

SEQ ID NO: 3088 - DNA, 20 bp, Artificial sequence
  Synthetic oligonucleotide
ttcaccactttacttggcaa

SEQ ID NO: 3089 - DNA, 20 bp, Artificial sequence
  Synthetic oligonucleotide
cagttcataaacctagaaac

SEQ ID NO: 3090 - DNA, 20 bp, Artificial sequence
  Synthetic oligonucleotide
tctgatacattaccaatgca

SEQ ID NO: 3091 - DNA, 20 bp, Artificial sequence
  Synthetic oligonucleotide
caacaggtcaatcttcctcc

SEQ ID NO: 3092 - DNA, 20 bp, Artificial sequence
  Synthetic oligonucleotide
acataatgaatttattcttt

SEQ ID NO: 3093 - DNA, 20 bp, Artificial sequence
  Synthetic oligonucleotide
ctccaatacacaacacatga

SEQ ID NO: 3094 - DNA, 20 bp, Artificial sequence
  Synthetic oligonucleotide
gccagtctcaaacaatccac

SEQ ID NO: 3095 - DNA, 20 bp, Artificial sequence
  Synthetic oligonucleotide
tcacacaatttccattgcgg

SEQ ID NO: 3096 - DNA, 20 bp, Artificial sequence
  Synthetic oligonucleotide
gttttcatattccttaggta

SEQ ID NO: 3097 - DNA, 20 bp, Artificial sequence
  Synthetic oligonucleotide
gtagaggaaatctcgctgca

SEQ ID NO: 3098 - DNA, 20 bp, Artificial sequence
  Synthetic oligonucleotide
tagataggattatacaacca

SEQ ID NO: 3099 - DNA, 20 bp, Artificial sequence
  Synthetic oligonucleotide
acagtcaattttatgtgcat

SEQ ID NO: 3100 - DNA, 20 bp, Artificial sequence
  Synthetic oligonucleotide
aatcactattttaatgtcac

SEQ ID NO: 3101 - DNA, 20 bp, Artificial sequence
  Synthetic oligonucleotide
acagtttattccaaatcatt

SEQ ID NO: 3102 - DNA, 20 bp, Artificial sequence
  Synthetic oligonucleotide
cgaagacattttcattctgt

SEQ ID NO: 3103 - DNA, 20 bp, Artificial sequence
  Synthetic oligonucleotide
acattgttaatatattttcc

SEQ ID NO: 3104 - DNA, 20 bp, Artificial sequence
  Synthetic oligonucleotide
cattactttttacaatggac

SEQ ID NO: 3105 - DNA, 20 bp, Artificial sequence
  Synthetic oligonucleotide
gcacattttttccccctgtt

SEQ ID NO: 3106 - DNA, 20 bp, Artificial sequence
  Synthetic oligonucleotide
aggttgaaatctaccatcaa

SEQ ID NO: 3107 - DNA, 20 bp, Artificial sequence
  Synthetic oligonucleotide
ttagtgattatacctctgca

SEQ ID NO: 3108 - DNA, 20 bp, Artificial sequence
  Synthetic oligonucleotide
gagatcttatttcctgggtc

SEQ ID NO: 3109 - DNA, 20 bp, Artificial sequence
  Synthetic oligonucleotide
acatccatacccttttttcc

SEQ ID NO: 3110 - DNA, 20 bp, Artificial sequence
  Synthetic oligonucleotide
acctagttttcaccatacac

SEQ ID NO: 3111 - DNA, 20 bp, Artificial sequence
  Synthetic oligonucleotide
acacatctcactagagactt

SEQ ID NO: 3112 - DNA, 20 bp, Artificial sequence
  Synthetic oligonucleotide
tccaacatacattcctctta

SEQ ID NO: 3113 - DNA, 20 bp, Artificial sequence
  Synthetic oligonucleotide
tcatgcttaaatcttttctg

SEQ ID NO: 3114 - DNA, 20 bp, Artificial sequence
  Synthetic oligonucleotide
cagaggcacactctgacccc

SEQ ID NO: 3115 - DNA, 20 bp, Artificial sequence
  Synthetic oligonucleotide
accacattccctctggagta

SEQ ID NO: 3116 - DNA, 20 bp, Artificial sequence
  Synthetic oligonucleotide
acactcatacatattgctta

SEQ ID NO: 3117 - DNA, 20 bp, Artificial sequence
  Synthetic oligonucleotide
gtcctgtgaatttattcccg

SEQ ID NO: 3118 - DNA, 20 bp, Artificial sequence
  Synthetic oligonucleotide
tgatcactcattcccactac

SEQ ID NO: 3119 - DNA, 20 bp, Artificial sequence
  Synthetic oligonucleotide
acaacacttttaagaatctc

SEQ ID NO: 3120 - DNA, 20 bp, Artificial sequence
  Synthetic oligonucleotide
ccacatcttacaacaaggga

SEQ ID NO: 3121 - DNA, 20 bp, Artificial sequence
  Synthetic oligonucleotide
tcaaccccgtttacaggcat

SEQ ID NO: 3122 - DNA, 20 bp, Artificial sequence
  Synthetic oligonucleotide
gggtcagaatcattgtggcc

SEQ ID NO: 3123 - DNA, 20 bp, Artificial sequence
  Synthetic oligonucleotide
ggcagaacattctacaacca

SEQ ID NO: 3124 - DNA, 20 bp, Artificial sequence
  Synthetic oligonucleotide
ggtaacattttcctacaaaa

SEQ ID NO: 3125 - DNA, 20 bp, Artificial sequence
  Synthetic oligonucleotide
ggcacataatataatcagca

SEQ ID NO: 3126 - DNA, 20 bp, Artificial sequence
  Synthetic oligonucleotide
ccttgactaaactattctgc

SEQ ID NO: 3127 - DNA, 20 bp, Artificial sequence
  Synthetic oligonucleotide
acgatatttataactgctct

SEQ ID NO: 3128 - DNA, 20 bp, Artificial sequence
  Synthetic oligonucleotide
ttataaccacattcacctcc

SEQ ID NO: 3129 - DNA, 20 bp, Artificial sequence
  Synthetic oligonucleotide
gcaagcacttacgagtgcct

SEQ ID NO: 3130 - DNA, 20 bp, Artificial sequence
  Synthetic oligonucleotide
tcgcagttcaacattttaat

SEQ ID NO: 3131 - DNA, 20 bp, Artificial sequence
  Synthetic oligonucleotide
aatatctttaaataatctcc

SEQ ID NO: 3132 - DNA, 20 bp, Artificial sequence
  Synthetic oligonucleotide
cagcagaaatttcacaagcc

SEQ ID NO: 3133 - DNA, 20 bp, Artificial sequence
  Synthetic oligonucleotide
gcgaacaatttaattaatct

SEQ ID NO: 3134 - DNA, 20 bp, Artificial sequence
  Synthetic oligonucleotide
aacctacaatattcttggaa

SEQ ID NO: 3135 - DNA, 20 bp, Artificial sequence
  Synthetic oligonucleotide
tcaaggatacaaaatttcat

SEQ ID NO: 3136 - DNA, 20 bp, Artificial sequence
  Synthetic oligonucleotide
atgcacaaattccactatca

SEQ ID NO: 3137 - DNA, 20 bp, Artificial sequence
  Synthetic oligonucleotide
gcctaaaattttccaaactt

SEQ ID NO: 3138 - DNA, 20 bp, Artificial sequence
  Synthetic oligonucleotide
ccaatatctttattccatct

SEQ ID NO: 3139 - DNA, 20 bp, Artificial sequence
  Synthetic oligonucleotide
tcaactctccttccctgagt

SEQ ID NO: 3140 - DNA, 20 bp, Artificial sequence
  Synthetic oligonucleotide
accagaactttccctccgct

SEQ ID NO: 3141 - DNA, 20 bp, Artificial sequence
  Synthetic oligonucleotide
gtgcagttcacattcaatca

SEQ ID NO: 3142 - DNA, 20 bp, Artificial sequence
  Synthetic oligonucleotide
ttgcattcccttcatggcac

SEQ ID NO: 3143 - DNA, 20 bp, Artificial sequence
  Synthetic oligonucleotide
gactgttgaatacaatcacc

SEQ ID NO: 3144 - DNA, 20 bp, Artificial sequence
  Synthetic oligonucleotide
cacagaatttacctacattt

SEQ ID NO: 3145 - DNA, 20 bp, Artificial sequence
  Synthetic oligonucleotide
ctggcttattttaattgttg

SEQ ID NO: 3146 - DNA, 20 bp, Artificial sequence
  Synthetic oligonucleotide
cagtgcatccttcaagcatc

SEQ ID NO: 3147 - DNA, 20 bp, Artificial sequence
  Synthetic oligonucleotide
gaaactcgatttaccaaggc

SEQ ID NO: 3148 - DNA, 20 bp, Artificial sequence
  Synthetic oligonucleotide
tggtatcctttaacacgcca

SEQ ID NO: 3149 - DNA, 20 bp, Artificial sequence
  Synthetic oligonucleotide
gatggtagtctaaattacga

SEQ ID NO: 3150 - DNA, 20 bp, Artificial sequence
  Synthetic oligonucleotide
tcaatgtattacttatgcaa

SEQ ID NO: 3151 - DNA, 20 bp, Artificial sequence
  Synthetic oligonucleotide
ccagcatttaaacccaggtc

SEQ ID NO: 3152 - DNA, 20 bp, Artificial sequence
  Synthetic oligonucleotide
gaaaatgtatttcctaacca

SEQ ID NO: 3153 - DNA, 20 bp, Artificial sequence
  Synthetic oligonucleotide
gcatctgctctatcttggca

SEQ ID NO: 3154 - DNA, 20 bp, Artificial sequence
  Synthetic oligonucleotide
acacatacttcatatctaac

SEQ ID NO: 3155 - DNA, 20 bp, Artificial sequence
  Synthetic oligonucleotide
tctcagtaaatacaagctta

SEQ ID NO: 3156 - DNA, 20 bp, Artificial sequence
  Synthetic oligonucleotide
ctgatttttttctttaagac

SEQ ID NO: 3157 - DNA, 20 bp, Artificial sequence
  Synthetic oligonucleotide
tggacaacacttcaacagta

SEQ ID NO: 3158 - DNA, 20 bp, Artificial sequence
  Synthetic oligonucleotide
tggatcacaaatttccttta

SEQ ID NO: 3159 - DNA, 20 bp, Artificial sequence
  Synthetic oligonucleotide
ggcaaccacaactcattcaa

SEQ ID NO: 3160 - DNA, 20 bp, Artificial sequence
  Synthetic oligonucleotide
ataatgtaccaacattcctt

SEQ ID NO: 3161 - DNA, 20 bp, Artificial sequence
  Synthetic oligonucleotide
gtcagagtttataaaatgca

SEQ ID NO: 3162 - DNA, 20 bp, Artificial sequence
  Synthetic oligonucleotide
ttgattccaatcattgttca

SEQ ID NO: 3163 - DNA, 20 bp, Artificial sequence
  Synthetic oligonucleotide
agctacgatcttcctagctc

SEQ ID NO: 3164 - DNA, 20 bp, Artificial sequence
  Synthetic oligonucleotide
ctttatttcagaactcacac

SEQ ID NO: 3165 - DNA, 20 bp, Artificial sequence
  Synthetic oligonucleotide
cctagtttttctaaatcctc

SEQ ID NO: 3166 - DNA, 20 bp, Artificial sequence
  Synthetic oligonucleotide
agcatctacaccacttccct

SEQ ID NO: 3167 - DNA, 20 bp, Artificial sequence
  Synthetic oligonucleotide
atcctgtttttccatcccaa

SEQ ID NO: 3168 - DNA, 20 bp, Artificial sequence
  Synthetic oligonucleotide
aacacagctttctcatcaaa

SEQ ID NO: 3169 - DNA, 20 bp, Artificial sequence
  Synthetic oligonucleotide
tgttctacaaatcattgaga

SEQ ID NO: 3170 - DNA, 20 bp, Artificial sequence
  Synthetic oligonucleotide
agaacacaccacccttatcc

SEQ ID NO: 3171 - DNA, 20 bp, Artificial sequence
  Synthetic oligonucleotide
aaggtaatcatatattacct

SEQ ID NO: 3172 - DNA, 20 bp, Artificial sequence
  Synthetic oligonucleotide
ccagtctcaaacaatccacc

SEQ ID NO: 3173 - DNA, 20 bp, Artificial sequence
  Synthetic oligonucleotide
agataggattatacaaccaa

SEQ ID NO: 3174 - DNA, 20 bp, Artificial sequence
  Synthetic oligonucleotide
gttgaatacaatcaccacat

SEQ ID NO: 3175 - DNA, 20 bp, Artificial sequence
  Synthetic oligonucleotide
aatgaatttattctttttcc

SEQ ID NO: 3176 - DNA, 20 bp, Artificial sequence
  Synthetic oligonucleotide
ccctgagtcctccatgccca

SEQ ID NO: 3177 - DNA, 20 bp, Artificial sequence
  Synthetic oligonucleotide
gatcacaaatttcctttata

SEQ ID NO: 3178 - DNA, 20 bp, Artificial sequence
  Synthetic oligonucleotide
actgctctttacacaggcta

SEQ ID NO: 3179 - DNA, 20 bp, Artificial sequence
  Synthetic oligonucleotide
tcagagtttataaaatgcat

SEQ ID NO: 3180 - DNA, 20 bp, Artificial sequence
  Synthetic oligonucleotide
ccaacatacattcctcttac

SEQ ID NO: 3181 - DNA, 20 bp, Artificial sequence
  Synthetic oligonucleotide
gatcactcattcccactaca

SEQ ID NO: 3182 - DNA, 20 bp, Artificial sequence
  Synthetic oligonucleotide
gcatatagaacatcgagact

SEQ ID NO: 3183 - DNA, 20 bp, Artificial sequence
  Synthetic oligonucleotide
ctttattccatctacaaggc

SEQ ID NO: 3184 - DNA, 20 bp, Artificial sequence
  Synthetic oligonucleotide
gcagaacattctacaaccat

SEQ ID NO: 3185 - DNA, 20 bp, Artificial sequence
  Synthetic oligonucleotide
agatcttatttcctgggtca

SEQ ID NO: 3186 - DNA, 20 bp, Artificial sequence
  Synthetic oligonucleotide
agtgattatacctctgcagc

SEQ ID NO: 3187 - DNA, 20 bp, Artificial sequence
  Synthetic oligonucleotide
gtcacatacattaagtctca

SEQ ID NO: 3188 - DNA, 20 bp, Artificial sequence
  Synthetic oligonucleotide
gctgacataaactttcccta

SEQ ID NO: 3189 - DNA, 20 bp, Artificial sequence
  Synthetic oligonucleotide
cttgactaaactattctgca

SEQ ID NO: 3190 - DNA, 20 bp, Artificial sequence
  Synthetic oligonucleotide
ggttaattagccattccaca

SEQ ID NO: 3191 - DNA, 20 bp, Artificial sequence
  Synthetic oligonucleotide
gaagacattttcattctgtt

SEQ ID NO: 3192 - DNA, 20 bp, Artificial sequence
  Synthetic oligonucleotide
tggttctttcttccttccat

SEQ ID NO: 3193 - DNA, 20 bp, Artificial sequence
  Synthetic oligonucleotide
gcttttgaaattctccatct

SEQ ID NO: 3194 - DNA, 20 bp, Artificial sequence
  Synthetic oligonucleotide
tccaaacaatttatgaggga

SEQ ID NO: 3195 - DNA, 20 bp, Artificial sequence
  Synthetic oligonucleotide
gaacaatttaattaatctct

SEQ ID NO: 3196 - DNA, 20 bp, Artificial sequence
  Synthetic oligonucleotide
acgctgactttcccacttcc

SEQ ID NO: 3197 - DNA, 20 bp, Artificial sequence
  Synthetic oligonucleotide
gcttatagcttcatcactcc

SEQ ID NO: 3198 - DNA, 20 bp, Artificial sequence
  Synthetic oligonucleotide
gcacatgtcaatttctatcc

SEQ ID NO: 3199 - DNA, 20 bp, Artificial sequence
  Synthetic oligonucleotide
gcaaccacaactcattcaaa

SEQ ID NO: 3200 - DNA, 20 bp, Artificial sequence
  Synthetic oligonucleotide
gcatctacaccacttccctt

SEQ ID NO: 3201 - DNA, 20 bp, Artificial sequence
  Synthetic oligonucleotide
ggtcagaatcattgtggcca

SEQ ID NO: 3202 - DNA, 20 bp, Artificial sequence
  Synthetic oligonucleotide
gcaacctcaaataagcagga

SEQ ID NO: 3203 - DNA, 20 bp, Artificial sequence
  Synthetic oligonucleotide
accacatgcacaccactatc

SEQ ID NO: 3204 - DNA, 20 bp, Artificial sequence
  Synthetic oligonucleotide
tttacaggcatttcaaactt

SEQ ID NO: 3205 - DNA, 20 bp, Artificial sequence
  Synthetic oligonucleotide
gcagttcacattcaatcaac

SEQ ID NO: 3206 - DNA, 20 bp, Artificial sequence
  Synthetic oligonucleotide
atacccttttttccccttca

SEQ ID NO: 3207 - DNA, 20 bp, Artificial sequence
  Synthetic oligonucleotide
ctagtttttctaaatcctca

SEQ ID NO: 3208 - DNA, 20 bp, Artificial sequence
  Synthetic oligonucleotide
acattccttttagtttgcta

SEQ ID NO: 3209 - DNA, 20 bp, Artificial sequence
  Synthetic oligonucleotide
agttcaacattttaatttca

SEQ ID NO: 3210 - DNA, 20 bp, Artificial sequence
  Synthetic oligonucleotide
cctgtgaatttattcccgta

SEQ ID NO: 3211 - DNA, 20 bp, Artificial sequence
  Synthetic oligonucleotide
gctacgatcttcctagctct

SEQ ID NO: 3212 - DNA, 20 bp, Artificial sequence
  Synthetic oligonucleotide
cactctgacccctcagtgac

SEQ ID NO: 3213 - DNA, 20 bp, Artificial sequence
  Synthetic oligonucleotide
ccatgactatttacttaggc

SEQ ID NO: 3214 - DNA, 20 bp, Artificial sequence
  Synthetic oligonucleotide
acctacaatattcttggaac

SEQ ID NO: 3215 - DNA, 20 bp, Artificial sequence
  Synthetic oligonucleotide
tgggtcattctctaattaca

SEQ ID NO: 3216 - DNA, 20 bp, Artificial sequence
  Synthetic oligonucleotide
agcaaattaacattactttt

SEQ ID NO: 3217 - DNA, 20 bp, Artificial sequence
  Synthetic oligonucleotide
agtaaactagtaactggcat

SEQ ID NO: 3218 - DNA, 20 bp, Artificial sequence
  Synthetic oligonucleotide
actcagtaatacttttagaa

SEQ ID NO: 3219 - DNA, 20 bp, Artificial sequence
  Synthetic oligonucleotide
gcatctctcacactgcctcc

SEQ ID NO: 3220 - DNA, 20 bp, Artificial sequence
  Synthetic oligonucleotide
acagaatttacctacattta

SEQ ID NO: 3221 - DNA, 20 bp, Artificial sequence
  Synthetic oligonucleotide
tgaatttttttattttgggc

SEQ ID NO: 3222 - DNA, 20 bp, Artificial sequence
  Synthetic oligonucleotide
ctggctttaaatctcctctg

SEQ ID NO: 3223 - DNA, 20 bp, Artificial sequence
  Synthetic oligonucleotide
ttgaaatctaccatcaagct

SEQ ID NO: 3224 - DNA, 20 bp, Artificial sequence
  Synthetic oligonucleotide
tctgactgactataaaggct

SEQ ID NO: 3225 - DNA, 20 bp, Artificial sequence
  Synthetic oligonucleotide
tgctctgtcatccatgcagc

SEQ ID NO: 3226 - DNA, 20 bp, Artificial sequence
  Synthetic oligonucleotide
ctgctctacatcctttgaat

SEQ ID NO: 3227 - DNA, 20 bp, Artificial sequence
  Synthetic oligonucleotide
ccaaacttaagcataaggga

SEQ ID NO: 3228 - DNA, 20 bp, Artificial sequence
  Synthetic oligonucleotide
caagcaacaaacatcatcat

SEQ ID NO: 3229 - DNA, 20 bp, Artificial sequence
  Synthetic oligonucleotide
gcagaaatttcacaagccct

SEQ ID NO: 3230 - DNA, 20 bp, Artificial sequence
  Synthetic oligonucleotide
cattgttaatatattttcca

SEQ ID NO: 3231 - DNA, 20 bp, Artificial sequence
  Synthetic oligonucleotide
accaaatgaaactcacttcc

SEQ ID NO: 3232 - DNA, 20 bp, Artificial sequence
  Synthetic oligonucleotide
tcctaggatctcttcaacac

SEQ ID NO: 3233 - DNA, 20 bp, Artificial sequence
  Synthetic oligonucleotide
cacacaatttccattgcggc

SEQ ID NO: 3234 - DNA, 20 bp, Artificial sequence
  Synthetic oligonucleotide
cagtttattccaaatcattc

SEQ ID NO: 3235 - DNA, 20 bp, Artificial sequence
  Synthetic oligonucleotide
tcaacaatacattcatgcat

SEQ ID NO: 3236 - DNA, 20 bp, Artificial sequence
  Synthetic oligonucleotide
ggtagtctaaattacgacat

SEQ ID NO: 3237 - DNA, 20 bp, Artificial sequence
  Synthetic oligonucleotide
ataaccacattcacctccct

SEQ ID NO: 3238 - DNA, 20 bp, Artificial sequence
  Synthetic oligonucleotide
cgtcacctccaaccacgcac

SEQ ID NO: 3239 - DNA, 20 bp, Artificial sequence
  Synthetic oligonucleotide
atatctttaaataatctcct

SEQ ID NO: 3240 - DNA, 20 bp, Artificial sequence
  Synthetic oligonucleotide
ccgtcgccacatcaagctca

SEQ ID NO: 3241 - DNA, 20 bp, Artificial sequence
  Synthetic oligonucleotide
tgcacaaattccactatcaa

SEQ ID NO: 3242 - DNA, 20 bp, Artificial sequence
  Synthetic oligonucleotide
ctgaccatttacacaaagtt

SEQ ID NO: 3243 - DNA, 20 bp, Artificial sequence
  Synthetic oligonucleotide
aatgtattattaccatggct

SEQ ID NO: 3244 - DNA, 20 bp, Artificial sequence
  Synthetic oligonucleotide
gactaaagatcaacttccaa

SEQ ID NO: 3245 - DNA, 20 bp, Artificial sequence
  Synthetic oligonucleotide
gatgaactccttaaagactt

SEQ ID NO: 3246 - DNA, 20 bp, Artificial sequence
  Synthetic oligonucleotide
actctggattccatttgctt

SEQ ID NO: 3247 - DNA, 20 bp, Artificial sequence
  Synthetic oligonucleotide
tctgcactcagatatactcc

SEQ ID NO: 3248 - DNA, 20 bp, Artificial sequence
  Synthetic oligonucleotide
gcttcatcactccaattttc

SEQ ID NO: 3249 - DNA, 20 bp, Artificial sequence
  Synthetic oligonucleotide
gataggattatacaaccaaa

SEQ ID NO: 3250 - DNA, 20 bp, Artificial sequence
  Synthetic oligonucleotide
ttgttgtttttaataggact

SEQ ID NO: 3251 - DNA, 20 bp, Artificial sequence
  Synthetic oligonucleotide
tggacattcacttcaattct

SEQ ID NO: 3252 - DNA, 20 bp, Artificial sequence
  Synthetic oligonucleotide
caacatacattcctcttacc

SEQ ID NO: 3253 - DNA, 20 bp, Artificial sequence
  Synthetic oligonucleotide
aacaaaagttatacttgctc

SEQ ID NO: 3254 - DNA, 20 bp, Artificial sequence
  Synthetic oligonucleotide
agtttattccaaatcattca

SEQ ID NO: 3255 - DNA, 20 bp, Artificial sequence
  Synthetic oligonucleotide
ctcttggaccttacttctta

SEQ ID NO: 3256 - DNA, 20 bp, Artificial sequence
  Synthetic oligonucleotide
aagcaacaaacatcatcatc

SEQ ID NO: 3257 - DNA, 20 bp, Artificial sequence
  Synthetic oligonucleotide
tctgtatttcaccaatactc

SEQ ID NO: 3258 - DNA, 20 bp, Artificial sequence
  Synthetic oligonucleotide
acacaatttccattgcggca

SEQ ID NO: 3259 - DNA, 20 bp, Artificial sequence
  Synthetic oligonucleotide
acatgtcaatttctatcccc

SEQ ID NO: 3260 - DNA, 20 bp, Artificial sequence
  Synthetic oligonucleotide
aacaatttaattaatctctt

SEQ ID NO: 3261 - DNA, 20 bp, Artificial sequence
  Synthetic oligonucleotide
ggtgatattctcaaatgctg

SEQ ID NO: 3262 - DNA, 20 bp, Artificial sequence
  Synthetic oligonucleotide
tgtgaatttattcccgtaca

SEQ ID NO: 3263 - DNA, 20 bp, Artificial sequence
  Synthetic oligonucleotide
ggtacagctcttcctagact

SEQ ID NO: 3264 - DNA, 20 bp, Artificial sequence
  Synthetic oligonucleotide
cacacaggcacactctgacc

SEQ ID NO: 3265 - DNA, 20 bp, Artificial sequence
  Synthetic oligonucleotide
caggcatttcaaacttacga

SEQ ID NO: 3266 - DNA, 20 bp, Artificial sequence
  Synthetic oligonucleotide
gtttttctaaatcctcacca

SEQ ID NO: 3267 - DNA, 20 bp, Artificial sequence
  Synthetic oligonucleotide
tgtcatggtttcaactctca

SEQ ID NO: 3268 - DNA, 20 bp, Artificial sequence
  Synthetic oligonucleotide
acataaactttccctagctg

SEQ ID NO: 3269 - DNA, 20 bp, Artificial sequence
  Synthetic oligonucleotide
tgggaacactttccttctgc

SEQ ID NO: 3270 - DNA, 20 bp, Artificial sequence
  Synthetic oligonucleotide
acatagtcatttacattcct

SEQ ID NO: 3271 - DNA, 20 bp, Artificial sequence
  Synthetic oligonucleotide
atcctttgaattcttccctc

SEQ ID NO: 3272 - DNA, 20 bp, Artificial sequence
  Synthetic oligonucleotide
gtacacatatttcaaacatc

SEQ ID NO: 3273 - DNA, 20 bp, Artificial sequence
  Synthetic oligonucleotide
ctatcattcattaacaagcc

SEQ ID NO: 3274 - DNA, 20 bp, Artificial sequence
  Synthetic oligonucleotide
ccaaagaatcttcctcccaa

SEQ ID NO: 3275 - DNA, 20 bp, Artificial sequence
  Synthetic oligonucleotide
tctttgctttcatctcggtc

SEQ ID NO: 3276 - DNA, 20 bp, Artificial sequence
  Synthetic oligonucleotide
gtcgagagctttcagaggct

SEQ ID NO: 3277 - DNA, 20 bp, Artificial sequence
  Synthetic oligonucleotide
taaccacattcacctccctc

SEQ ID NO: 3278 - DNA, 20 bp, Artificial sequence
  Synthetic oligonucleotide
acatgcacaccactatcccc

SEQ ID NO: 3279 - DNA, 20 bp, Artificial sequence
  Synthetic oligonucleotide
ttgggaatttctaatttctg

SEQ ID NO: 3280 - DNA, 20 bp, Artificial sequence
  Synthetic oligonucleotide
gccaagtatttaaagtcatt

SEQ ID NO: 3281 - DNA, 20 bp, Artificial sequence
  Synthetic oligonucleotide
tcaccacatcataatttgtc

SEQ ID NO: 3282 - DNA, 20 bp, Artificial sequence
  Synthetic oligonucleotide
ataaaggctttttctagctt

SEQ ID NO: 3283 - DNA, 20 bp, Artificial sequence
  Synthetic oligonucleotide
tgaaatctaccatcaagctc

SEQ ID NO: 3284 - DNA, 20 bp, Artificial sequence
  Synthetic oligonucleotide
tcactcattcccactacatt

SEQ ID NO: 3285 - DNA, 20 bp, Artificial sequence
  Synthetic oligonucleotide
atgaatttattctttttccc

SEQ ID NO: 3286 - DNA, 20 bp, Artificial sequence
  Synthetic oligonucleotide
acgacatacaacatacccca

SEQ ID NO: 3287 - DNA, 20 bp, Artificial sequence
  Synthetic oligonucleotide
ccttaaagacttccttttcc

SEQ ID NO: 3288 - DNA, 20 bp, Artificial sequence
  Synthetic oligonucleotide
gcagtctatctctcctgccc

SEQ ID NO: 3289 - DNA, 20 bp, Artificial sequence
  Synthetic oligonucleotide
gctgactttcccacttcccc

SEQ ID NO: 3290 - DNA, 20 bp, Artificial sequence
  Synthetic oligonucleotide
ccttcatttctgccaactta

SEQ ID NO: 3291 - DNA, 20 bp, Artificial sequence
  Synthetic oligonucleotide
ggtggaagacaatattgtta

SEQ ID NO: 3292 - DNA, 20 bp, Artificial sequence
  Synthetic oligonucleotide
gatctcttcaacacactgta

SEQ ID NO: 3293 - DNA, 20 bp, Artificial sequence
  Synthetic oligonucleotide
aggtaatcatatattacctt

SEQ ID NO: 3294 - DNA, 20 bp, Artificial sequence
  Synthetic oligonucleotide
agtctcaccatattagtgtt

SEQ ID NO: 3295 - DNA, 20 bp, Artificial sequence
  Synthetic oligonucleotide
gttaatatattttccagtca

SEQ ID NO: 3296 - DNA, 20 bp, Artificial sequence
  Synthetic oligonucleotide
catgactatttacttaggca

SEQ ID NO: 3297 - DNA, 20 bp, Artificial sequence
  Synthetic oligonucleotide
tcaccactctaaacatgttg

SEQ ID NO: 3298 - DNA, 20 bp, Artificial sequence
  Synthetic oligonucleotide
gagaagacttttattactga

SEQ ID NO: 3299 - DNA, 20 bp, Artificial sequence
  Synthetic oligonucleotide
ccactatcaaatatcccagt

SEQ ID NO: 3300 - DNA, 20 bp, Artificial sequence
  Synthetic oligonucleotide
ttcaacattttaatttcaat

SEQ ID NO: 3301 - DNA, 20 bp, Artificial sequence
  Synthetic oligonucleotide
atcaagctcacctctccagc

SEQ ID NO: 3302 - DNA, 20 bp, Artificial sequence
  Synthetic oligonucleotide
ttctacaaatcattgagagc

SEQ ID NO: 3303 - DNA, 20 bp, Artificial sequence
  Synthetic oligonucleotide
gtagtttgccctcagagggc

SEQ ID NO: 3304 - DNA, 20 bp, Artificial sequence
  Synthetic oligonucleotide
tgattatacctctgcagcca

SEQ ID NO: 3305 - DNA, 20 bp, Artificial sequence
  Synthetic oligonucleotide
gaacattctacaaccatgga

SEQ ID NO: 3306 - DNA, 20 bp, Artificial sequence
  Synthetic oligonucleotide
tcctttataaatcttgctga

SEQ ID NO: 3307 - DNA, 20 bp, Artificial sequence
  Synthetic oligonucleotide
cagttcacattcaatcaacc

SEQ ID NO: 3308 - DNA, 20 bp, Artificial sequence
  Synthetic oligonucleotide
gccacaggactccctcccaa

SEQ ID NO: 3309 - DNA, 20 bp, Artificial sequence
  Synthetic oligonucleotide
tgctgtcaatactttcccca

SEQ ID NO: 3310 - DNA, 20 bp, Artificial sequence
  Synthetic oligonucleotide
gaacatttttaatcatgcaa

SEQ ID NO: 3311 - DNA, 20 bp, Artificial sequence
  Synthetic oligonucleotide
cattagttcattcaacagat

SEQ ID NO: 3312 - DNA, 20 bp, Artificial sequence
  Synthetic oligonucleotide
acaccacttcccttactgaa

SEQ ID NO: 3313 - DNA, 20 bp, Artificial sequence
  Synthetic oligonucleotide
ctccaattactctttttcca

SEQ ID NO: 3314 - DNA, 20 bp, Artificial sequence
  Synthetic oligonucleotide
acatcgagactcccaatgct

SEQ ID NO: 3315 - DNA, 20 bp, Artificial sequence
  Synthetic oligonucleotide
aagacattttcattctgttc

SEQ ID NO: 3316 - DNA, 20 bp, Artificial sequence
  Synthetic oligonucleotide
gcaagagccatagaacagcc

SEQ ID NO: 3317 - DNA, 20 bp, Artificial sequence
  Synthetic oligonucleotide
ccatggctacacccttttta

SEQ ID NO: 3318 - DNA, 20 bp, Artificial sequence
  Synthetic oligonucleotide
cttgacttccattctgtctt

SEQ ID NO: 3319 - DNA, 20 bp, Artificial sequence
  Synthetic oligonucleotide
aactattttatcatattggt

SEQ ID NO: 3320 - DNA, 20 bp, Artificial sequence
  Synthetic oligonucleotide
ggagctagaatcccatggct

SEQ ID NO: 3321 - DNA, 20 bp, Artificial sequence
  Synthetic oligonucleotide
taagcaggactacccagggc

SEQ ID NO: 3322 - DNA, 20 bp, Artificial sequence
  Synthetic oligonucleotide
acccttttttccccttcacc

SEQ ID NO: 3323 - DNA, 20 bp, Artificial sequence
  Synthetic oligonucleotide
cgcctgcaccatgttcctca

SEQ ID NO: 3324 - DNA, 20 bp, Artificial sequence
  Synthetic oligonucleotide
cgagactgaattgcctggat

SEQ ID NO: 3325 - DNA, 20 bp, Artificial sequence
  Synthetic oligonucleotide
atagttctcaatgaggtaaa

SEQ ID NO: 3326 - DNA, 20 bp, Artificial sequence
  Synthetic oligonucleotide
tctgcttttgcctccaaaaa

SEQ ID NO: 3327 - DNA, 20 bp, Artificial sequence
  Synthetic oligonucleotide
gtaacattgacaccaccacc

SEQ ID NO: 3328 - DNA, 20 bp, Artificial sequence
  Synthetic oligonucleotide
ttgcctctgattccctgaac

SEQ ID NO: 3329 - DNA, 20 bp, Artificial sequence
  Synthetic oligonucleotide
gccttccttccactggccat

SEQ ID NO: 3330 - DNA, 20 bp, Artificial sequence
  Synthetic oligonucleotide
ctgcatcagctttatttgtt

SEQ ID NO: 3331 - DNA, 20 bp, Artificial sequence
  Synthetic oligonucleotide
ctctgattccctgaactggc

SEQ ID NO: 3332 - DNA, 20 bp, Artificial sequence
  Synthetic oligonucleotide
cttgagggactcgaaggcct

SEQ ID NO: 3333 - DNA, 20 bp, Artificial sequence
  Synthetic oligonucleotide
gcagggttaccgccatcccc

SEQ ID NO: 3334 - DNA, 20 bp, Artificial sequence
  Synthetic oligonucleotide
ggctgctgctccaagcagct

SEQ ID NO: 3335 - DNA, 20 bp, Artificial sequence
  Synthetic oligonucleotide
ttctctattgcacattccaa

SEQ ID NO: 3336 - DNA, 20 bp, Artificial sequence
  Synthetic oligonucleotide
gatgccatcacagagctgaa

SEQ ID NO: 3337 - DNA, 20 bp, Artificial sequence
  Synthetic oligonucleotide
tagcattcttatctgcacgg

SEQ ID NO: 3338 - DNA, 20 bp, Artificial sequence
  Synthetic oligonucleotide
tggcggtctcccgcccggca

SEQ ID NO: 3339 - DNA, 20 bp, Artificial sequence
  Synthetic oligonucleotide
cggcagtccccggaggcctc

SEQ ID NO: 3340 - DNA, 20 bp, Artificial sequence
  Synthetic oligonucleotide
ccgccatccccgccgtagcc

SEQ ID NO: 3341 - DNA, 20 bp, Artificial sequence
  Synthetic oligonucleotide
tgcagcggctcctcagccac

SEQ ID NO: 3342 - DNA, 20 bp, Artificial sequence
  Synthetic oligonucleotide
tcttttcctgcatcagcttt

SEQ ID NO: 3343 - DNA, 20 bp, Artificial sequence
  Synthetic oligonucleotide
ggcagatgctcactgctgat

SEQ ID NO: 3344 - DNA, 20 bp, Artificial sequence
  Synthetic oligonucleotide
catcagctttatttgttcct

SEQ ID NO: 3345 - DNA, 20 bp, Artificial sequence
  Synthetic oligonucleotide
cggccgtccatcttggaccc

SEQ ID NO: 3346 - DNA, 20 bp, Artificial sequence
  Synthetic oligonucleotide
agctgctccaccatgggcac

SEQ ID NO: 3347 - DNA, 20 bp, Artificial sequence
  Synthetic oligonucleotide
tctgtgtatcaccttcctca

SEQ ID NO: 3348 - DNA, 20 bp, Artificial sequence
  Synthetic oligonucleotide
gacaggccccaacaaggctc

SEQ ID NO: 3349 - DNA, 20 bp, Artificial sequence
  Synthetic oligonucleotide
aggcttgttttcttgatcac

SEQ ID NO: 3350 - DNA, 20 bp, Artificial sequence
  Synthetic oligonucleotide
gggtcactctgtctctgcgg

SEQ ID NO: 3351 - DNA, 20 bp, Artificial sequence
  Synthetic oligonucleotide
ggttaccgccatccccgccg

SEQ ID NO: 3352 - DNA, 20 bp, Artificial sequence
  Synthetic oligonucleotide
ttcacagcatccaaatgtga

SEQ ID NO: 3353 - DNA, 20 bp, Artificial sequence
  Synthetic oligonucleotide
agagctcctgaatacgagaa

SEQ ID NO: 3354 - DNA, 20 bp, Artificial sequence
  Synthetic oligonucleotide
tcgaaggccttcatcagctt

SEQ ID NO: 3355 - DNA, 20 bp, Artificial sequence
  Synthetic oligonucleotide
aaacctccacagggcagcac

SEQ ID NO: 3356 - DNA, 20 bp, Artificial sequence
  Synthetic oligonucleotide
aaagcttcacagcatccaaa

SEQ ID NO: 3357 - DNA, 20 bp, Artificial sequence
  Synthetic oligonucleotide
gcctcccctcgcgagaggac

SEQ ID NO: 3358 - DNA, 20 bp, Artificial sequence
  Synthetic oligonucleotide
gagctgaatgattttaggaa

SEQ ID NO: 3359 - DNA, 20 bp, Artificial sequence
  Synthetic oligonucleotide
cttcattctccttgtggcac

SEQ ID NO: 3360 - DNA, 20 bp, Artificial sequence
  Synthetic oligonucleotide
gaactggcccacttcaatgt

SEQ ID NO: 3361 - DNA, 20 bp, Artificial sequence
  Synthetic oligonucleotide
ttaccttatctgcacggttc

SEQ ID NO: 3362 - DNA, 20 bp, Artificial sequence
  Synthetic oligonucleotide
ttcaagctcttttcctgcat

SEQ ID NO: 3363 - DNA, 20 bp, Artificial sequence
  Synthetic oligonucleotide
tctcgactaaagcaggattt

SEQ ID NO: 3364 - DNA, 20 bp, Artificial sequence
  Synthetic oligonucleotide
ttcaatacaaagccaataaa

SEQ ID NO: 3365 - DNA, 20 bp, Artificial sequence
  Synthetic oligonucleotide
taacccgtaactgaaccagc

SEQ ID NO: 3366 - DNA, 20 bp, Artificial sequence
  Synthetic oligonucleotide
ggcagctgctgtgattctcc

SEQ ID NO: 3367 - DNA, 20 bp, Artificial sequence
  Synthetic oligonucleotide
tgtttcaatacaaagccaat

SEQ ID NO: 3368 - DNA, 20 bp, Artificial sequence
  Synthetic oligonucleotide
ctattgcacattccaagttt

SEQ ID NO: 3369 - DNA, 20 bp, Artificial sequence
  Synthetic oligonucleotide
agcggctcctcagccacagc

SEQ ID NO: 3370 - DNA, 20 bp, Artificial sequence
  Synthetic oligonucleotide
tgctgctccaagcagcttac

SEQ ID NO: 3371 - DNA, 20 bp, Artificial sequence
  Synthetic oligonucleotide
gcagcatccccaaacagatc

SEQ ID NO: 3372 - DNA, 20 bp, Artificial sequence
  Synthetic oligonucleotide
gcatccccaaacagatcatt

SEQ ID NO: 3373 - DNA, 20 bp, Artificial sequence
  Synthetic oligonucleotide
ccatccaagcttccacacca

SEQ ID NO: 3374 - DNA, 20 bp, Artificial sequence
  Synthetic oligonucleotide
caagcttccacaccagtggg

SEQ ID NO: 3375 - DNA, 20 bp, Artificial sequence
  Synthetic oligonucleotide
atacagtgcagcatccccaa

SEQ ID NO: 3376 - DNA, 20 bp, Artificial sequence
  Synthetic oligonucleotide
cagtgcagcatccccaaaca

SEQ ID NO: 3377 - DNA, 20 bp, Artificial sequence
  Synthetic oligonucleotide
attctctctctttgaaacca

SEQ ID NO: 3378 - DNA, 20 bp, Artificial sequence
  Synthetic oligonucleotide
ccaggactgcagacactccc

SEQ ID NO: 3379 - DNA, 20 bp, Artificial sequence
  Synthetic oligonucleotide
acaaatgcacagatgaaaac

SEQ ID NO: 3380 - DNA, 20 bp, Artificial sequence
  Synthetic oligonucleotide
tctctctttgaaaccattgc

SEQ ID NO: 3381 - DNA, 20 bp, Artificial sequence
  Synthetic oligonucleotide
catgcgagccagcacacgga

SEQ ID NO: 3382 - DNA, 20 bp, Artificial sequence
  Synthetic oligonucleotide
tgggtttcaagctcttttcc

SEQ ID NO: 3383 - DNA, 20 bp, Artificial sequence
  Synthetic oligonucleotide
gtctcagtaacattgacacc

SEQ ID NO: 3384 - DNA, 20 bp, Artificial sequence
  Synthetic oligonucleotide
tgtttggatctacttcctcc

SEQ ID NO: 3385 - DNA, 20 bp, Artificial sequence
  Synthetic oligonucleotide
acattgacaccaccacctct

SEQ ID NO: 3386 - DNA, 20 bp, Artificial sequence
  Synthetic oligonucleotide
gacagtcgcttccacttgtc

SEQ ID NO: 3387 - DNA, 20 bp, Artificial sequence
  Synthetic oligonucleotide
gtgtatcaccttcctcactg

SEQ ID NO: 3388 - DNA, 20 bp, Artificial sequence
  Synthetic oligonucleotide
tgattgcctctgattcccta

SEQ ID NO: 3389 - DNA, 20 bp, Artificial sequence
  Synthetic oligonucleotide
aggccttcatcagcttttcc

SEQ ID NO: 3390 - DNA, 20 bp, Artificial sequence
  Synthetic oligonucleotide
atgtttggaatgattgcctc

SEQ ID NO: 3391 - DNA, 20 bp, Artificial sequence
  Synthetic oligonucleotide
aacattccagacttgaagat

SEQ ID NO: 3392 - DNA, 20 bp, Artificial sequence
  Synthetic oligonucleotide
cagcaaacctccacagggca

SEQ ID NO: 3393 - DNA, 20 bp, Artificial sequence
  Synthetic oligonucleotide
ggcagggactgatacagtgc

SEQ ID NO: 3394 - DNA, 20 bp, Artificial sequence
  Synthetic oligonucleotide
aaactgtttcaatacaaagc

SEQ ID NO: 3395 - DNA, 20 bp, Artificial sequence
  Synthetic oligonucleotide
taactgaaccagctgcgcca

SEQ ID NO: 3396 - DNA, 20 bp, Artificial sequence
  Synthetic oligonucleotide
actggatgagtctcagtaac

SEQ ID NO: 3397 - DNA, 20 bp, Artificial sequence
  Synthetic oligonucleotide
ttttgcctccaaaaagctca

SEQ ID NO: 3398 - DNA, 20 bp, Artificial sequence
  Synthetic oligonucleotide
tcacagccttccttccactg

SEQ ID NO: 3399 - DNA, 20 bp, Artificial sequence
  Synthetic oligonucleotide
tccgcctgcaccatgttcct

SEQ ID NO: 3400 - DNA, 20 bp, Artificial sequence
  Synthetic oligonucleotide
tctgattccctgaactggcc

SEQ ID NO: 3401 - DNA, 20 bp, Artificial sequence
  Synthetic oligonucleotide
ctctattgcacattccaagt

SEQ ID NO: 3402 - DNA, 20 bp, Artificial sequence
  Synthetic oligonucleotide
gttaccgccatccccgccgt

SEQ ID NO: 3403 - DNA, 20 bp, Artificial sequence
  Synthetic oligonucleotide
tgcctctgattccctgaact

SEQ ID NO: 3404 - DNA, 20 bp, Artificial sequence
  Synthetic oligonucleotide
tctctgtgtatcaccttcct

SEQ ID NO: 3405 - DNA, 20 bp, Artificial sequence
  Synthetic oligonucleotide
ttgcacattccaagtttggc

SEQ ID NO: 3406 - DNA, 20 bp, Artificial sequence
  Synthetic oligonucleotide
cagcatccccaaacagatca

SEQ ID NO: 3407 - DNA, 20 bp, Artificial sequence
  Synthetic oligonucleotide
acaggccccaacaaggctct

SEQ ID NO: 3408 - DNA, 20 bp, Artificial sequence
  Synthetic oligonucleotide
caaggcttgttttcttgatc

SEQ ID NO: 3409 - DNA, 20 bp, Artificial sequence
  Synthetic oligonucleotide
atgcgagccagcacacggaa

SEQ ID NO: 3410 - DNA, 20 bp, Artificial sequence
  Synthetic oligonucleotide
ccctgtataatgatgagccc

SEQ ID NO: 3411 - DNA, 20 bp, Artificial sequence
  Synthetic oligonucleotide
gctcttttcctgcatcagct

SEQ ID NO: 3412 - DNA, 20 bp, Artificial sequence
  Synthetic oligonucleotide
acccgtaactgaaccagctg

SEQ ID NO: 3413 - DNA, 20 bp, Artificial sequence
  Synthetic oligonucleotide
gtttcaatacaaagccaata

SEQ ID NO: 3414 - DNA, 20 bp, Artificial sequence
  Synthetic oligonucleotide
agggttaccgccatccccgc

SEQ ID NO: 3415 - DNA, 20 bp, Artificial sequence
  Synthetic oligonucleotide
cagccttccttccactggcc

SEQ ID NO: 3416 - DNA, 20 bp, Artificial sequence
  Synthetic oligonucleotide
cgccatccccgccgtagcct

SEQ ID NO: 3417 - DNA, 20 bp, Artificial sequence
  Synthetic oligonucleotide
gtgtcgccggcccgcaggct

SEQ ID NO: 3418 - DNA, 20 bp, Artificial sequence
  Synthetic oligonucleotide
gcagatgctcactgctgatc

SEQ ID NO: 3419 - DNA, 20 bp, Artificial sequence
  Synthetic oligonucleotide
tgcatcagctttatttgttc

SEQ ID NO: 3420 - DNA, 20 bp, Artificial sequence
  Synthetic oligonucleotide
ggccgtccatcttggacccg

SEQ ID NO: 3421 - DNA, 20 bp, Artificial sequence
  Synthetic oligonucleotide
ctgtgtatcaccttcctcac

SEQ ID NO: 3422 - DNA, 20 bp, Artificial sequence
  Synthetic oligonucleotide
agagctgctccaccatgggc

SEQ ID NO: 3423 - DNA, 20 bp, Artificial sequence
  Synthetic oligonucleotide
ttgctgggtcactctgtctc

SEQ ID NO: 3424 - DNA, 20 bp, Artificial sequence
  Synthetic oligonucleotide
aggacaggccccaacaaggc

SEQ ID NO: 3425 - DNA, 20 bp, Artificial sequence
  Synthetic oligonucleotide
cgaaggccttcatcagcttt

SEQ ID NO: 3426 - DNA, 20 bp, Artificial sequence
  Synthetic oligonucleotide
aggagagctcctgaatacga

SEQ ID NO: 3427 - DNA, 20 bp, Artificial sequence
  Synthetic oligonucleotide
gagctcctgaatacgagaaa

SEQ ID NO: 3428 - DNA, 20 bp, Artificial sequence
  Synthetic oligonucleotide
gaatgattgcctctgattcc

SEQ ID NO: 3429 - DNA, 20 bp, Artificial sequence
  Synthetic oligonucleotide
ggactcgaaggccttcatca

SEQ ID NO: 3430 - DNA, 20 bp, Artificial sequence
  Synthetic oligonucleotide
gcaaacctccacagggcagc

SEQ ID NO: 3431 - DNA, 20 bp, Artificial sequence
  Synthetic oligonucleotide
aagcttcacagcatccaaat

SEQ ID NO: 3432 - DNA, 20 bp, Artificial sequence
  Synthetic oligonucleotide
ttcattctccttgtggcact

SEQ ID NO: 3433 - DNA, 20 bp, Artificial sequence
  Synthetic oligonucleotide
catgatgccatcacagagct

SEQ ID NO: 3434 - DNA, 20 bp, Artificial sequence
  Synthetic oligonucleotide
aactggcccacttcaatgta

SEQ ID NO: 3435 - DNA, 20 bp, Artificial sequence
  Synthetic oligonucleotide
atgccatcacagagctgaat

SEQ ID NO: 3436 - DNA, 20 bp, Artificial sequence
  Synthetic oligonucleotide
tgagtctcagtaacattgac

SEQ ID NO: 3437 - DNA, 20 bp, Artificial sequence
  Synthetic oligonucleotide
catggcggtctcccgcccgg

SEQ ID NO: 3438 - DNA, 20 bp, Artificial sequence
  Synthetic oligonucleotide
gcagcggctcctcagccaca

SEQ ID NO: 3439 - DNA, 20 bp, Artificial sequence
  Synthetic oligonucleotide
cttttcctgcatcagcttta

SEQ ID NO: 3440 - DNA, 20 bp, Artificial sequence
  Synthetic oligonucleotide
ggcggtctcccgcccggcac

SEQ ID NO: 3441 - DNA, 20 bp, Artificial sequence
  Synthetic oligonucleotide
atgattgcctctgattccct

SEQ ID NO: 3442 - DNA, 20 bp, Artificial sequence
  Synthetic oligonucleotide
gctgctgtgattctccggaa

SEQ ID NO: 3443 - DNA, 20 bp, Artificial sequence
  Synthetic oligonucleotide
cagggactgatacagtgcag

SEQ ID NO: 3444 - DNA, 20 bp, Artificial sequence
  Synthetic oligonucleotide
aggatagttctcaatgaggt

SEQ ID NO: 3445 - DNA, 20 bp, Artificial sequence
  Synthetic oligonucleotide
actgtttcaatacaaagcca

SEQ ID NO: 3446 - DNA, 20 bp, Artificial sequence
  Synthetic oligonucleotide
gtgcagcatccccaaacaga

SEQ ID NO: 3447 - DNA, 20 bp, Artificial sequence
  Synthetic oligonucleotide
catccccaaacagatcattc

SEQ ID NO: 3448 - DNA, 20 bp, Artificial sequence
  Synthetic oligonucleotide
gaaggcctcaggctcagccc

SEQ ID NO: 3449 - DNA, 20 bp, Artificial sequence
  Synthetic oligonucleotide
gctgctgctccaagcagctt

SEQ ID NO: 3450 - DNA, 20 bp, Artificial sequence
  Synthetic oligonucleotide
atccaagcttccacaccagt

SEQ ID NO: 3451 - DNA, 20 bp, Artificial sequence
  Synthetic oligonucleotide
tacagtgcagcatccccaaa

SEQ ID NO: 3452 - DNA, 20 bp, Artificial sequence
  Synthetic oligonucleotide
tctcagtaacattgacacca

SEQ ID NO: 3453 - DNA, 20 bp, Artificial sequence
  Synthetic oligonucleotide
atgcacagatgaaaacaatt

SEQ ID NO: 3454 - DNA, 20 bp, Artificial sequence
  Synthetic oligonucleotide
ttctctctctttgaaaccat

SEQ ID NO: 3455 - DNA, 20 bp, Artificial sequence
  Synthetic oligonucleotide
tgtgtgtttggatctacttc

SEQ ID NO: 3456 - DNA, 20 bp, Artificial sequence
  Synthetic oligonucleotide
gtttcaagctcttttcctgc

SEQ ID NO: 3457 - DNA, 20 bp, Artificial sequence
  Synthetic oligonucleotide
tgcttttgcctccaaaaagc

SEQ ID NO: 3458 - DNA, 20 bp, Artificial sequence
  Synthetic oligonucleotide
taacattgacaccaccacct

SEQ ID NO: 3459 - DNA, 20 bp, Artificial sequence
  Synthetic oligonucleotide
ctgctccaccatgggcacca

SEQ ID NO: 3460 - DNA, 20 bp, Artificial sequence
  Synthetic oligonucleotide
gtccccggaggcctcgggcc

SEQ ID NO: 3461 - DNA, 20 bp, Artificial sequence
  Synthetic oligonucleotide
attgtgtccttcttgagtgc

SEQ ID NO: 3462 - DNA, 20 bp, Artificial sequence
  Synthetic oligonucleotide
gcggctcctcagccacagcc

SEQ ID NO: 3463 - DNA, 20 bp, Artificial sequence
  Synthetic oligonucleotide
catttaccttatctgcacgg

SEQ ID NO: 3464 - DNA, 20 bp, Artificial sequence
  Synthetic oligonucleotide
atgaatagcattcttatctg

SEQ ID NO: 3465 - DNA, 20 bp, Artificial sequence
  Synthetic oligonucleotide
ctgaatgattttaggaattc

SEQ ID NO: 3466 - DNA, 20 bp, Artificial sequence
  Synthetic oligonucleotide
tggttctcgactaaagcagg

SEQ ID NO: 3467 - DNA, 20 bp, Artificial sequence
  Synthetic oligonucleotide
tctgggtcctctctgtgtct

SEQ ID NO: 3468 - DNA, 20 bp, Artificial sequence
  Synthetic oligonucleotide
aatacaaagccaataaacac

SEQ ID NO: 3469 - DNA, 20 bp, Artificial sequence
  Synthetic oligonucleotide
cagtcgcttccacttgtctt

SEQ ID NO: 3470 - DNA, 20 bp, Artificial sequence
  Synthetic oligonucleotide
attgacaccaccacctcttt

SEQ ID NO: 3471 - DNA, 20 bp, Artificial sequence
  Synthetic oligonucleotide
tttggatctacttcctcctc

SEQ ID NO: 3472 - DNA, 20 bp, Artificial sequence
  Synthetic oligonucleotide
actatttctctattgcacat

SEQ ID NO: 3473 - DNA, 20 bp, Artificial sequence
  Synthetic oligonucleotide
aatattctctctctttgaaa

SEQ ID NO: 3474 - DNA, 20 bp, Artificial sequence
  Synthetic oligonucleotide
ctctttgaaaccattgcttg

SEQ ID NO: 3475 - DNA, 20 bp, Artificial sequence
  Synthetic oligonucleotide
atcagctttatttgttcctc

SEQ ID NO: 3476 - DNA, 20 bp, Artificial sequence
  Synthetic oligonucleotide
gcctctgattccctgaactg

SEQ ID NO: 3477 - DNA, 20 bp, Artificial sequence
  Synthetic oligonucleotide
ctatttctctattgcacatt

SEQ ID NO: 3478 - DNA, 20 bp, Artificial sequence
  Synthetic oligonucleotide
tggcagatgctcactgctga

SEQ ID NO: 3479 - DNA, 20 bp, Artificial sequence
  Synthetic oligonucleotide
gggttaccgccatccccgcc

SEQ ID NO: 3480 - DNA, 20 bp, Artificial sequence
  Synthetic oligonucleotide
tgctgggtcactctgtctct

SEQ ID NO: 3481 - DNA, 20 bp, Artificial sequence
  Synthetic oligonucleotide
acagtgcagcatccccaaac

SEQ ID NO: 3482 - DNA, 20 bp, Artificial sequence
  Synthetic oligonucleotide
tccaagcttccacaccagtg

SEQ ID NO: 3483 - DNA, 20 bp, Artificial sequence
  Synthetic oligonucleotide
tctctctctttgaaaccatt

SEQ ID NO: 3484 - DNA, 20 bp, Artificial sequence
  Synthetic oligonucleotide
ctcgaaggccttcatcagct

SEQ ID NO: 3485 - DNA, 20 bp, Artificial sequence
  Synthetic oligonucleotide
gagagctcctgaatacgaga

SEQ ID NO: 3486 - DNA, 20 bp, Artificial sequence
  Synthetic oligonucleotide
gtgcagcggctcctcagcca

SEQ ID NO: 3487 - DNA, 20 bp, Artificial sequence
  Synthetic oligonucleotide
attgcctctgattccctgaa

SEQ ID NO: 3488 - DNA, 20 bp, Artificial sequence
  Synthetic oligonucleotide
ctcttttcctgcatcagctt

SEQ ID NO: 3489 - DNA, 20 bp, Artificial sequence
  Synthetic oligonucleotide
agccttccttccactggcca

SEQ ID NO: 3490 - DNA, 20 bp, Artificial sequence
  Synthetic oligonucleotide
cagatgctcactgctgatcc

SEQ ID NO: 3491 - DNA, 20 bp, Artificial sequence
  Synthetic oligonucleotide
gcatcagctttatttgttcc

SEQ ID NO: 3492 - DNA, 20 bp, Artificial sequence
  Synthetic oligonucleotide
ttaccgccatccccgccgta

SEQ ID NO: 3493 - DNA, 20 bp, Artificial sequence
  Synthetic oligonucleotide
gagctgctccaccatgggca

SEQ ID NO: 3494 - DNA, 20 bp, Artificial sequence
  Synthetic oligonucleotide
ctctgtgtatcaccttcctc

SEQ ID NO: 3495 - DNA, 20 bp, Artificial sequence
  Synthetic oligonucleotide
ggacaggccccaacaaggct

SEQ ID NO: 3496 - DNA, 20 bp, Artificial sequence
  Synthetic oligonucleotide
gaaggccttcatcagctttt

SEQ ID NO: 3497 - DNA, 20 bp, Artificial sequence
  Synthetic oligonucleotide
ccgcctgcaccatgttcctc

SEQ ID NO: 3498 - DNA, 20 bp, Artificial sequence
  Synthetic oligonucleotide
aaggcttgttttcttgatca

SEQ ID NO: 3499 - DNA, 20 bp, Artificial sequence
  Synthetic oligonucleotide
tgcagggttaccgccatccc

SEQ ID NO: 3500 - DNA, 20 bp, Artificial sequence
  Synthetic oligonucleotide
aatgattgcctctgattccc

SEQ ID NO: 3501 - DNA, 20 bp, Artificial sequence
  Synthetic oligonucleotide
cacggcagtccccggaggcc

SEQ ID NO: 3502 - DNA, 20 bp, Artificial sequence
  Synthetic oligonucleotide
cttcacagcatccaaatgtg

SEQ ID NO: 3503 - DNA, 20 bp, Artificial sequence
  Synthetic oligonucleotide
ctgattccctgaactggccc

SEQ ID NO: 3504 - DNA, 20 bp, Artificial sequence
  Synthetic oligonucleotide
tcacagagctgaatgatttt

SEQ ID NO: 3505 - DNA, 20 bp, Artificial sequence
  Synthetic oligonucleotide
caaacctccacagggcagca

SEQ ID NO: 3506 - DNA, 20 bp, Artificial sequence
  Synthetic oligonucleotide
tcttcattctccttgtggca

SEQ ID NO: 3507 - DNA, 20 bp, Artificial sequence
  Synthetic oligonucleotide
atgatgccatcacagagctg

SEQ ID NO: 3508 - DNA, 20 bp, Artificial sequence
  Synthetic oligonucleotide
agcattcttatctgcacggt

SEQ ID NO: 3509 - DNA, 20 bp, Artificial sequence
  Synthetic oligonucleotide
cagcggctcctcagccacag

SEQ ID NO: 3510 - DNA, 20 bp, Artificial sequence
  Synthetic oligonucleotide
aatagcattcttatctgcac

SEQ ID NO: 3511 - DNA, 20 bp, Artificial sequence
  Synthetic oligonucleotide
ttttcctgcatcagctttat

SEQ ID NO: 3512 - DNA, 20 bp, Artificial sequence
  Synthetic oligonucleotide
atggcggtctcccgcccggc

SEQ ID NO: 3513 - DNA, 20 bp, Artificial sequence
  Synthetic oligonucleotide
tttcaatacaaagccaataa

SEQ ID NO: 3514 - DNA, 20 bp, Artificial sequence
  Synthetic oligonucleotide
gttctcgactaaagcaggat

SEQ ID NO: 3515 - DNA, 20 bp, Artificial sequence
  Synthetic oligonucleotide
cgtaactgaaccagctgcgc

SEQ ID NO: 3516 - DNA, 20 bp, Artificial sequence
  Synthetic oligonucleotide
ctgctgtgattctccggaac

SEQ ID NO: 3517 - DNA, 20 bp, Artificial sequence
  Synthetic oligonucleotide
agggactgatacagtgcagc

SEQ ID NO: 3518 - DNA, 20 bp, Artificial sequence
  Synthetic oligonucleotide
ggatagttctcaatgaggta

SEQ ID NO: 3519 - DNA, 20 bp, Artificial sequence
  Synthetic oligonucleotide
tctattgcacattccaagtt

SEQ ID NO: 3520 - DNA, 20 bp, Artificial sequence
  Synthetic oligonucleotide
ctgtttcaatacaaagccaa

SEQ ID NO: 3521 - DNA, 20 bp, Artificial sequence
  Synthetic oligonucleotide
ctgctgctccaagcagctta

SEQ ID NO: 3522 - DNA, 20 bp, Artificial sequence
  Synthetic oligonucleotide
aaggcctcaggctcagcccc

SEQ ID NO: 3523 - DNA, 20 bp, Artificial sequence
  Synthetic oligonucleotide
tgcagcatccccaaacagat

SEQ ID NO: 3524 - DNA, 20 bp, Artificial sequence
  Synthetic oligonucleotide
agcatccccaaacagatcat

SEQ ID NO: 3525 - DNA, 20 bp, Artificial sequence
  Synthetic oligonucleotide
tgcgagccagcacacggaaa

SEQ ID NO: 3526 - DNA, 20 bp, Artificial sequence
  Synthetic oligonucleotide
gggctgctgctccaagcagc

SEQ ID NO: 3527 - DNA, 20 bp, Artificial sequence
  Synthetic oligonucleotide
tacaaatgcacagatgaaaa

SEQ ID NO: 3528 - DNA, 20 bp, Artificial sequence
  Synthetic oligonucleotide
tgcacagatgaaaacaatta

SEQ ID NO: 3529 - DNA, 20 bp, Artificial sequence
  Synthetic oligonucleotide
tattctctctctttgaaacc

SEQ ID NO: 3530 - DNA, 20 bp, Artificial sequence
  Synthetic oligonucleotide
gtgtttggatctacttcctc

SEQ ID NO: 3531 - DNA, 20 bp, Artificial sequence
  Synthetic oligonucleotide
tttcaagctcttttcctgca

SEQ ID NO: 3532 - DNA, 20 bp, Artificial sequence
  Synthetic oligonucleotide
gcttttgcctccaaaaagct

SEQ ID NO: 3533 - DNA, 20 bp, Artificial sequence
  Synthetic oligonucleotide
agtctcagtaacattgacac

SEQ ID NO: 3534 - DNA, 20 bp, Artificial sequence
  Synthetic oligonucleotide
ttgtggcactgctgcaggac

SEQ ID NO: 3535 - DNA, 20 bp, Artificial sequence
  Synthetic oligonucleotide
atgatctgttttgaatgata

SEQ ID NO: 3536 - DNA, 20 bp, Artificial sequence
  Synthetic oligonucleotide
agacagtcgcttccacttgt

SEQ ID NO: 3537 - DNA, 20 bp, Artificial sequence
  Synthetic oligonucleotide
aacattgacaccaccacctc

SEQ ID NO: 3538 - DNA, 20 bp, Artificial sequence
  Synthetic oligonucleotide
ttttctgcttttgcctccaa

SEQ ID NO: 3539 - DNA, 20 bp, Artificial sequence
  Synthetic oligonucleotide
agcggccgtccatcttggac

SEQ ID NO: 3540 - DNA, 20 bp, Artificial sequence
  Synthetic oligonucleotide
ccccaacaaggctctgcctc

SEQ ID NO: 3541 - DNA, 20 bp, Artificial sequence
  Synthetic oligonucleotide
acttctgcccaccagcggta

SEQ ID NO: 3542 - DNA, 20 bp, Artificial sequence
  Synthetic oligonucleotide
tgtgtatcaccttcctcact

SEQ ID NO: 3543 - DNA, 20 bp, Artificial sequence
  Synthetic oligonucleotide
catcttggacccgtcccggc

SEQ ID NO: 3544 - DNA, 20 bp, Artificial sequence
  Synthetic oligonucleotide
acaaagcttcacagcatcca

SEQ ID NO: 3545 - DNA, 20 bp, Artificial sequence
  Synthetic oligonucleotide
ctggcccacttcaatgtatt

SEQ ID NO: 3546 - DNA, 20 bp, Artificial sequence
  Synthetic oligonucleotide
ctctgtgtcttcttctggtg

SEQ ID NO: 3547 - DNA, 20 bp, Artificial sequence
  Synthetic oligonucleotide
cggctcctcagccacagccg

SEQ ID NO: 3548 - DNA, 20 bp, Artificial sequence
  Synthetic oligonucleotide
aattaacccgtaactgaacc

SEQ ID NO: 3549 - DNA, 20 bp, Artificial sequence
  Synthetic oligonucleotide
tccccaaacagatcattcaa

SEQ ID NO: 3550 - DNA, 20 bp, Artificial sequence
  Synthetic oligonucleotide
tttttgggtttcaagctctt

SEQ ID NO: 3551 - DNA, 20 bp, Artificial sequence
  Synthetic oligonucleotide
tcagctttatttgttcctct

SEQ ID NO: 3552 - DNA, 17 bp, Artificial sequence
  Synthetic oligonucleotide
acagcttttatttccat

SEQ ID NO: 3553 - DNA, 17 bp, Artificial sequence
  Synthetic oligonucleotide
actcatttccaccttca

SEQ ID NO: 3554 - DNA, 17 bp, Artificial sequence
  Synthetic oligonucleotide
agaggtcatcttcggtc

SEQ ID NO: 3555 - DNA, 17 bp, Artificial sequence
  Synthetic oligonucleotide
agcttttatttccatac

SEQ ID NO: 3556 - DNA, 17 bp, Artificial sequence
  Synthetic oligonucleotide
atcttgttttaccaccc

SEQ ID NO: 3557 - DNA, 17 bp, Artificial sequence
  Synthetic oligonucleotide
attactttttacaatgg

SEQ ID NO: 3558 - DNA, 17 bp, Artificial sequence
  Synthetic oligonucleotide
cacagcttttatttcca

SEQ ID NO: 3559 - DNA, 17 bp, Artificial sequence
  Synthetic oligonucleotide
cactcatttccaccttc

SEQ ID NO: 3560 - DNA, 17 bp, Artificial sequence
  Synthetic oligonucleotide
cagcttttatttccata

SEQ ID NO: 3561 - DNA, 17 bp, Artificial sequence
  Synthetic oligonucleotide
catcttgttttaccacc

SEQ ID NO: 3562 - DNA, 17 bp, Artificial sequence
  Synthetic oligonucleotide
cattactttttacaatg

SEQ ID NO: 3563 - DNA, 17 bp, Artificial sequence
  Synthetic oligonucleotide
catttccaccttcagct

SEQ ID NO: 3564 - DNA, 17 bp, Artificial sequence
  Synthetic oligonucleotide
ctagaggtcatcttcgg

SEQ ID NO: 3565 - DNA, 17 bp, Artificial sequence
  Synthetic oligonucleotide
ctcatttccaccttcag

SEQ ID NO: 3566 - DNA, 17 bp, Artificial sequence
  Synthetic oligonucleotide
ctttgatttttaccagt

SEQ ID NO: 3567 - DNA, 17 bp, Artificial sequence
  Synthetic oligonucleotide
gaggtcatcttcggtca

SEQ ID NO: 3568 - DNA, 17 bp, Artificial sequence
  Synthetic oligonucleotide
gcatcttgttttaccac

SEQ ID NO: 3569 - DNA, 17 bp, Artificial sequence
  Synthetic oligonucleotide
gcattactttttacaat

SEQ ID NO: 3570 - DNA, 17 bp, Artificial sequence
  Synthetic oligonucleotide
gctgctcactcatttcc

SEQ ID NO: 3571 - DNA, 17 bp, Artificial sequence
  Synthetic oligonucleotide
gctttgatttttaccag

SEQ ID NO: 3572 - DNA, 17 bp, Artificial sequence
  Synthetic oligonucleotide
gcttttatttccataca

SEQ ID NO: 3573 - DNA, 17 bp, Artificial sequence
  Synthetic oligonucleotide
ggtcacagcttttattt

SEQ ID NO: 3574 - DNA, 17 bp, Artificial sequence
  Synthetic oligonucleotide
ggttagttttcctttta

SEQ ID NO: 3575 - DNA, 17 bp, Artificial sequence
  Synthetic oligonucleotide
gtcacagcttttatttc

SEQ ID NO: 3576 - DNA, 17 bp, Artificial sequence
  Synthetic oligonucleotide
gttagttttccttttat

SEQ ID NO: 3577 - DNA, 17 bp, Artificial sequence
  Synthetic oligonucleotide
tagaggtcatcttcggt

SEQ ID NO: 3578 - DNA, 17 bp, Artificial sequence
  Synthetic oligonucleotide
tagttttccttttatat

SEQ ID NO: 3579 - DNA, 17 bp, Artificial sequence
  Synthetic oligonucleotide
tcacagcttttatttcc

SEQ ID NO: 3580 - DNA, 17 bp, Artificial sequence
  Synthetic oligonucleotide
tcactcatttccacctt

SEQ ID NO: 3581 - DNA, 17 bp, Artificial sequence
  Synthetic oligonucleotide
tcatttccaccttcagc

SEQ ID NO: 3582 - DNA, 17 bp, Artificial sequence
  Synthetic oligonucleotide
tcttgttttaccaccca

SEQ ID NO: 3583 - DNA, 17 bp, Artificial sequence
  Synthetic oligonucleotide
tgctgctcactcatttc

SEQ ID NO: 3584 - DNA, 17 bp, Artificial sequence
  Synthetic oligonucleotide
tggtcacagcttttatt

SEQ ID NO: 3585 - DNA, 17 bp, Artificial sequence
  Synthetic oligonucleotide
tgttgctgctcactcat

SEQ ID NO: 3586 - DNA, 17 bp, Artificial sequence
  Synthetic oligonucleotide
ttactttttacaatgga

SEQ ID NO: 3587 - DNA, 17 bp, Artificial sequence
  Synthetic oligonucleotide
ttagttttccttttata

SEQ ID NO: 3588 - DNA, 17 bp, Artificial sequence
  Synthetic oligonucleotide
ttgatttttaccagtta

SEQ ID NO: 3589 - DNA, 17 bp, Artificial sequence
  Synthetic oligonucleotide
ttgctgctcactcattt

SEQ ID NO: 3590 - DNA, 17 bp, Artificial sequence
  Synthetic oligonucleotide
tttgatttttaccagtt

SEQ ID NO: 3591 - DNA, 20 bp, Artificial sequence
  Synthetic oligonucleotide
tttctctattgcacattcca

SEQ ID NO: 3592 - DNA, 20 bp, Artificial sequence
  Synthetic oligonucleotide
acacagcctgctagaggtca

SEQ ID NO: 3593 - DNA, 20 bp, Artificial sequence
  Synthetic oligonucleotide
ctgctcactcatttccacct

SEQ ID NO: 3594 - DNA, 20 bp, Artificial sequence
  Synthetic oligonucleotide
ctcactcatttccaccttca

SEQ ID NO: 3595 - DNA, 20 bp, Artificial sequence
  Synthetic oligonucleotide
acagcctgctagaggtcatc

SEQ ID NO: 3596 - DNA, 20 bp, Artificial sequence
  Synthetic oligonucleotide
ctttgatttttaccagttaa

SEQ ID NO: 3597 - DNA, 20 bp, Artificial sequence
  Synthetic oligonucleotide
tcatttccaccttcagctgt

SEQ ID NO: 3598 - DNA, 20 bp, Artificial sequence
  Synthetic oligonucleotide
ttgggggtggtcacagcttt

SEQ ID NO: 3599 - DNA, 20 bp, Artificial sequence
  Synthetic oligonucleotide
ttttgctttgatttttacca

SEQ ID NO: 3600 - DNA, 20 bp, Artificial sequence
  Synthetic oligonucleotide
ccaccttcagctgttttgta

SEQ ID NO: 3601 - DNA, 20 bp, Artificial sequence
  Synthetic oligonucleotide
tgctgctcactcatttccac

SEQ ID NO: 3602 - DNA, 20 bp, Artificial sequence
  Synthetic oligonucleotide
gttttttgctttgattttta

SEQ ID NO: 3603 - DNA, 20 bp, Artificial sequence
  Synthetic oligonucleotide
tttgctttgatttttaccag

SEQ ID NO: 3604 - DNA, 20 bp, Artificial sequence
  Synthetic oligonucleotide
ttccaccttcagctgttttg

SEQ ID NO: 3605 - DNA, 20 bp, Artificial sequence
  Synthetic oligonucleotide
tttttgctttgatttttacc

SEQ ID NO: 3606 - DNA, 20 bp, Artificial sequence
  Synthetic oligonucleotide
gcctgctagaggtcatcttc

SEQ ID NO: 3607 - DNA, 20 bp, Artificial sequence
  Synthetic oligonucleotide
ttgtaggttttttgctttga

SEQ ID NO: 3608 - DNA, 20 bp, Artificial sequence
  Synthetic oligonucleotide
tggtcacagcttttatttcc

SEQ ID NO: 3609 - DNA, 20 bp, Artificial sequence
  Synthetic oligonucleotide
tgttttaccacccatgctgg

SEQ ID NO: 3610 - DNA, 20 bp, Artificial sequence
  Synthetic oligonucleotide
gtgcattactttttacaatg

SEQ ID NO: 3611 - DNA, 20 bp, Artificial sequence
  Synthetic oligonucleotide
ggggtggtcacagcttttat

SEQ ID NO: 3612 - DNA, 20 bp, Artificial sequence
  Synthetic oligonucleotide
tagaggtcatcttcggtcat

SEQ ID NO: 3613 - DNA, 20 bp, Artificial sequence
  Synthetic oligonucleotide
gttgggggtggtcacagctt

SEQ ID NO: 3614 - DNA, 20 bp, Artificial sequence
  Synthetic oligonucleotide
tatgttgctgctcactcatt

SEQ ID NO: 3615 - DNA, 20 bp, Artificial sequence
  Synthetic oligonucleotide
tgctttgatttttaccagtt

SEQ ID NO: 3616 - DNA, 20 bp, Artificial sequence
  Synthetic oligonucleotide
atttccaccttcagctgttt

SEQ ID NO: 3617 - DNA, 20 bp, Artificial sequence
  Synthetic oligonucleotide
gaggtcatcttcggtcatgt

SEQ ID NO: 3618 - DNA, 20 bp, Artificial sequence
  Synthetic oligonucleotide
tcttgttttaccacccatgc

SEQ ID NO: 3619 - DNA, 20 bp, Artificial sequence
  Synthetic oligonucleotide
cacagcttttatttccatac

SEQ ID NO: 3620 - DNA, 20 bp, Artificial sequence
  Synthetic oligonucleotide
tactttttacaatggacagt

SEQ ID NO: 3621 - DNA, 20 bp, Artificial sequence
  Synthetic oligonucleotide
aggtcatcttcggtcatgtg

SEQ ID NO: 3622 - DNA, 20 bp, Artificial sequence
  Synthetic oligonucleotide
attactttttacaatggaca

SEQ ID NO: 3623 - DNA, 20 bp, Artificial sequence
  Synthetic oligonucleotide
tgcattactttttacaatgg

SEQ ID NO: 3624 - DNA, 20 bp, Artificial sequence
  Synthetic oligonucleotide
ggcatcttgttttaccaccc

SEQ ID NO: 3625 - DNA, 20 bp, Artificial sequence
  Synthetic oligonucleotide
ttgctttgatttttaccagt

SEQ ID NO: 3626 - DNA, 20 bp, Artificial sequence
  Synthetic oligonucleotide
atcttgttttaccacccatg

SEQ ID NO: 3627 - DNA, 20 bp, Artificial sequence
  Synthetic oligonucleotide
ttactttttacaatggacag

SEQ ID NO: 3628 - DNA, 20 bp, Artificial sequence
  Synthetic oligonucleotide
tgggggtggtcacagctttt

SEQ ID NO: 3629 - DNA, 20 bp, Artificial sequence
  Synthetic oligonucleotide
ctgctagaggtcatcttcgg

SEQ ID NO: 3630 - DNA, 20 bp, Artificial sequence
  Synthetic oligonucleotide
gctgctcactcatttccacc

SEQ ID NO: 3631 - DNA, 20 bp, Artificial sequence
  Synthetic oligonucleotide
gttgctgctcactcatttcc

SEQ ID NO: 3632 - DNA, 20 bp, Artificial sequence
  Synthetic oligonucleotide
agcctgctagaggtcatctt

SEQ ID NO: 3633 - DNA, 20 bp, Artificial sequence
  Synthetic oligonucleotide
tggcatcttgttttaccacc

SEQ ID NO: 3634 - DNA, 20 bp, Artificial sequence
  Synthetic oligonucleotide
aagtgcattactttttacaa

SEQ ID NO: 3635 - DNA, 20 bp, Artificial sequence
  Synthetic oligonucleotide
ggtggtcacagcttttattt

SEQ ID NO: 3636 - DNA, 20 bp, Artificial sequence
  Synthetic oligonucleotide
atggcatcttgttttaccac

SEQ ID NO: 3637 - DNA, 20 bp, Artificial sequence
  Synthetic oligonucleotide
ctcatttccaccttcagctg

SEQ ID NO: 3638 - DNA, 20 bp, Artificial sequence
  Synthetic oligonucleotide
tgtaggttttttgctttgat

SEQ ID NO: 3639 - DNA, 20 bp, Artificial sequence
  Synthetic oligonucleotide
gttttaccacccatgctgga

SEQ ID NO: 3640 - DNA, 20 bp, Artificial sequence
  Synthetic oligonucleotide
cctgctagaggtcatcttcg

SEQ ID NO: 3641 - DNA, 20 bp, Artificial sequence
  Synthetic oligonucleotide
taggttttttgctttgattt

SEQ ID NO: 3642 - DNA, 20 bp, Artificial sequence
  Synthetic oligonucleotide
ttttttgctttgatttttac

SEQ ID NO: 3643 - DNA, 20 bp, Artificial sequence
  Synthetic oligonucleotide
cagcctgctagaggtcatct

SEQ ID NO: 3644 - DNA, 20 bp, Artificial sequence
  Synthetic oligonucleotide
gggggtggtcacagctttta

SEQ ID NO: 3645 - DNA, 20 bp, Artificial sequence
  Synthetic oligonucleotide
gtaggttttttgctttgatt

SEQ ID NO: 3646 - DNA, 20 bp, Artificial sequence
  Synthetic oligonucleotide
acagcttttatttccataca

SEQ ID NO: 3647 - DNA, 20 bp, Artificial sequence
  Synthetic oligonucleotide
cacagcctgctagaggtcat

SEQ ID NO: 3648 - DNA, 20 bp, Artificial sequence
  Synthetic oligonucleotide
gctcactcatttccaccttc

SEQ ID NO: 3649 - DNA, 20 bp, Artificial sequence
  Synthetic oligonucleotide
gtggtcacagcttttatttc

SEQ ID NO: 3650 - DNA, 20 bp, Artificial sequence
  Synthetic oligonucleotide
tgttgctgctcactcatttc

SEQ ID NO: 3651 - DNA, 20 bp, Artificial sequence
  Synthetic oligonucleotide
ttgttttaccacccatgctg

SEQ ID NO: 3652 - DNA, 20 bp, Artificial sequence
  Synthetic oligonucleotide
atgttgctgctcactcattt

SEQ ID NO: 3653 - DNA, 20 bp, Artificial sequence
  Synthetic oligonucleotide
tttccaccttcagctgtttt

SEQ ID NO: 3654 - DNA, 20 bp, Artificial sequence
  Synthetic oligonucleotide
agaggtcatcttcggtcatg

SEQ ID NO: 3655 - DNA, 20 bp, Artificial sequence
  Synthetic oligonucleotide
ggttttttgctttgattttt

SEQ ID NO: 3656 - DNA, 20 bp, Artificial sequence
  Synthetic oligonucleotide
aggttttttgctttgatttt

SEQ ID NO: 3657 - DNA, 20 bp, Artificial sequence
  Synthetic oligonucleotide
gctagaggtcatcttcggtc

SEQ ID NO: 3658 - DNA, 20 bp, Artificial sequence
  Synthetic oligonucleotide
ggtcatcttcggtcatgtga

SEQ ID NO: 3659 - DNA, 20 bp, Artificial sequence
  Synthetic oligonucleotide
tgctagaggtcatcttcggt

SEQ ID NO: 3660 - DNA, 20 bp, Artificial sequence
  Synthetic oligonucleotide
tcactcatttccaccttcag

SEQ ID NO: 3661 - DNA, 20 bp, Artificial sequence
  Synthetic oligonucleotide
catttccaccttcagctgtt

SEQ ID NO: 3662 - DNA, 20 bp, Artificial sequence
  Synthetic oligonucleotide
tccaccttcagctgttttgt

SEQ ID NO: 3663 - DNA, 20 bp, Artificial sequence
  Synthetic oligonucleotide
gggtggtcacagcttttatt

SEQ ID NO: 3664 - DNA, 20 bp, Artificial sequence
  Synthetic oligonucleotide
agtgcattactttttacaat

SEQ ID NO: 3665 - DNA, 20 bp, Artificial sequence
  Synthetic oligonucleotide
gttagttttccttttatatt

SEQ ID NO: 3666 - DNA, 20 bp, Artificial sequence
  Synthetic oligonucleotide
acttggttagttttcctttt

SEQ ID NO: 3667 - DNA, 20 bp, Artificial sequence
  Synthetic oligonucleotide
tccttttatattcatcagaa

SEQ ID NO: 3668 - DNA, 20 bp, Artificial sequence
  Synthetic oligonucleotide
ttccttttatattcatcaga

SEQ ID NO: 3669 - DNA, 20 bp, Artificial sequence
  Synthetic oligonucleotide
ttagttttccttttatattc

SEQ ID NO: 3670 - DNA, 20 bp, Artificial sequence
  Synthetic oligonucleotide
taacttggttagttttcctt

SEQ ID NO: 3671 - DNA, 20 bp, Artificial sequence
  Synthetic oligonucleotide
aacttggttagttttccttt

SEQ ID NO: 3672 - DNA, 20 bp, Artificial sequence
  Synthetic oligonucleotide
ttggttagttttccttttat

SEQ ID NO: 3673 - DNA, 20 bp, Artificial sequence
  Synthetic oligonucleotide
tagttttccttttatattca

SEQ ID NO: 3674 - DNA, 20 bp, Artificial sequence
  Synthetic oligonucleotide
cttggttagttttcctttta

SEQ ID NO: 3675 - DNA, 20 bp, Artificial sequence
  Synthetic oligonucleotide
agttttccttttatattcat

SEQ ID NO: 3676 - DNA, 20 bp, Artificial sequence
  Synthetic oligonucleotide
tttccttttatattcatcag

SEQ ID NO: 3677 - DNA, 20 bp, Artificial sequence
  Synthetic oligonucleotide
atattttctcaactttaaac

SEQ ID NO: 3678 - DNA, 20 bp, Artificial sequence
  Synthetic oligonucleotide
catattttctcaactttaaa

SEQ ID NO: 3679 - DNA, 20 bp, Artificial sequence
  Synthetic oligonucleotide
ccatattttctcaactttaa

SEQ ID NO: 3680 - DNA, 20 bp, Artificial sequence
  Synthetic oligonucleotide
agccatattttctcaacttt

SEQ ID NO: 3681 - DNA, 20 bp, Artificial sequence
  Synthetic oligonucleotide
caagccatattttctcaact

SEQ ID NO: 3682 - DNA, 20 bp, Artificial sequence
  Synthetic oligonucleotide
acaagccatattttctcaac

SEQ ID NO: 3683 - DNA, 18 bp, Artificial sequence
  Synthetic oligonucleotide
tcacagcttttatttcca

SEQ ID NO: 3684 - DNA, 18 bp, Artificial sequence
  Synthetic oligonucleotide
tcatttccaccttcagct

SEQ ID NO: 3685 - DNA, 18 bp, Artificial sequence
  Synthetic oligonucleotide
atcttgttttaccaccca

SEQ ID NO: 3686 - DNA, 18 bp, Artificial sequence
  Synthetic oligonucleotide
ggttagttttccttttat

SEQ ID NO: 3687 - DNA, 18 bp, Artificial sequence
  Synthetic oligonucleotide
gcattactttttacaatg

SEQ ID NO: 3688 - DNA, 18 bp, Artificial sequence
  Synthetic oligonucleotide
gtcacagcttttatttcc

SEQ ID NO: 3689 - DNA, 18 bp, Artificial sequence
  Synthetic oligonucleotide
ctcatttccaccttcagc

SEQ ID NO: 3690 - DNA, 18 bp, Artificial sequence
  Synthetic oligonucleotide
cacagcttttatttccat

SEQ ID NO: 3691 - DNA, 18 bp, Artificial sequence
  Synthetic oligonucleotide
catcttgttttaccaccc

SEQ ID NO: 3692 - DNA, 18 bp, Artificial sequence
  Synthetic oligonucleotide
attactttttacaatgga

SEQ ID NO: 3693 - DNA, 18 bp, Artificial sequence
  Synthetic oligonucleotide
agaggtcatcttcggtca

SEQ ID NO: 3694 - DNA, 18 bp, Artificial sequence
  Synthetic oligonucleotide
ttagttttccttttatat

SEQ ID NO: 3695 - DNA, 18 bp, Artificial sequence
  Synthetic oligonucleotide
tagaggtcatcttcggtc

SEQ ID NO: 3696 - DNA, 18 bp, Artificial sequence
  Synthetic oligonucleotide
tttgatttttaccagtta

SEQ ID NO: 3697 - DNA, 18 bp, Artificial sequence
  Synthetic oligonucleotide
cattactttttacaatgg

SEQ ID NO: 3698 - DNA, 18 bp, Artificial sequence
  Synthetic oligonucleotide
gttagttttccttttata

SEQ ID NO: 3699 - DNA, 18 bp, Artificial sequence
  Synthetic oligonucleotide
gcatcttgttttaccacc

SEQ ID NO: 3700 - DNA, 18 bp, Artificial sequence
  Synthetic oligonucleotide
ggtcacagcttttatttc

SEQ ID NO: 3701 - DNA, 18 bp, Artificial sequence
  Synthetic oligonucleotide
acagcttttatttccata

SEQ ID NO: 3702 - DNA, 18 bp, Artificial sequence
  Synthetic oligonucleotide
cagcttttatttccatac

SEQ ID NO: 3703 - DNA, 18 bp, Artificial sequence
  Synthetic oligonucleotide
tggtcacagcttttattt

SEQ ID NO: 3704 - DNA, 18 bp, Artificial sequence
  Synthetic oligonucleotide
agcttttatttccataca

SEQ ID NO: 3705 - DNA, 18 bp, Artificial sequence
  Synthetic oligonucleotide
ccatattttctcaacttt

SEQ ID NO: 3706 - DNA, 18 bp, Artificial sequence
  Synthetic oligonucleotide
gccatattttctcaactt

SEQ ID NO: 3707 - DNA, 18 bp, Artificial sequence
  Synthetic oligonucleotide
catattttctcaacttta

1.-56. (canceled)

57. An oligomeric compound comprising a modified oligonucleotide according to the following chemical notation:
(SEQ ID NO: 3619)
^{m}CₑₛAₑₒ^{m}CₑₒAₑₒGₑₒ^{m}CₑₒT_{ds}T_{ds}T_{ds}T_{ds}A_{ds}T_{ds}T_{ds}T_{ds}^{m}C_{ds}^{m}C_{ds}AₑₒTₑₛAₑₛ^{m}Cₑ,
wherein
A=an adenine,
^{m}C=a 5-methylcytosine,
G=a guanine,
T=a thymine,
e=a 2′-O-methoxyethylribose modified sugar,
d=a 2′-deoxyribose sugar moiety,
s=a phosphorothioate internucleoside linkage, and
o=a phosphodiester internucleoside linkage.

58. (canceled)

59. (canceled)

60. The oligomeric compound of claim 57, wherein the modified oligonucleotide is a pharmaceutically acceptable salt.

61. The oligomeric compound of claim 60, which is a pharmaceutically acceptable salt comprising one or more cations selected from sodium, potassium, calcium, and magnesium.

62. The oligomeric compound of claim 57, wherein the oligomeric compound is a singled-stranded oligomeric compound.

63. A modified oligonucleotide according to the following chemical structure: [chemical structure]
or a pharmaceutically acceptable salt thereof.

64. The modified oligonucleotide of claim 63, which is a pharmaceutically acceptable salt comprising one or more cations selected from sodium, potassium, calcium, and magnesium.

65. A modified oligonucleotide according to the following chemical structure:

[chemical structure]

66.-79. (canceled)

80. A population of oligomeric compounds of claim 57, wherein all of the phosphorothioate internucleoside linkages of the modified oligonucleotide are stereorandom.

81.-106. (canceled)

107. A pharmaceutical composition comprising the oligomeric compound of claim 57 and a pharmaceutically acceptable carrier or diluent.

108. The pharmaceutical composition of claim 107, wherein the pharmaceutically acceptable diluent comprises phosphate buffered saline (PBS) or artificial cerebrospinal fluid (aCSF).

109. The pharmaceutical composition of claim 108, wherein the pharmaceutical composition consists essentially of the oligomeric compound and PBS.

110. The pharmaceutical composition of claim 108, wherein the pharmaceutical composition consists essentially of the oligomeric compound and aCSF.

111.-128. (canceled)

129. A pharmaceutical composition comprising the modified oligonucleotide of claim 63; and a pharmaceutically acceptable carrier or diluent.

130. The pharmaceutical composition of claim 129, wherein the pharmaceutically acceptable diluent comprises phosphate buffered saline (PBS) or artificial cerebrospinal fluid (aCSF).

131. The pharmaceutical composition of claim 130, wherein the pharmaceutical composition consists essentially of the modified oligonucleotide and PBS.

132. The pharmaceutical composition of claim 130, wherein the pharmaceutical composition consists essentially of the modified oligonucleotide and aCSF.

133. A pharmaceutical composition comprising the modified oligonucleotide of claim 64; and a pharmaceutically acceptable carrier or diluent.

134. The pharmaceutical composition of claim 133, wherein the pharmaceutically acceptable diluent comprises phosphate buffered saline (PBS) or artificial cerebrospinal fluid (aCSF).

135. The pharmaceutical composition of claim 134, wherein the pharmaceutical composition consists essentially of the modified oligonucleotide and PBS.

136. The pharmaceutical composition of claim 134, wherein the pharmaceutical composition consists essentially of the modified oligonucleotide and aCSF.

137. A pharmaceutical composition comprising the modified oligonucleotide of claim 65; and a pharmaceutically acceptable carrier or diluent.

138. The pharmaceutical composition of claim 137, wherein the pharmaceutically acceptable diluent comprises phosphate buffered saline (PBS) or artificial cerebrospinal fluid (aCSF).

139. The pharmaceutical composition of claim 138, wherein the pharmaceutical composition consists essentially of the modified oligonucleotide and PBS.

140. The pharmaceutical composition of claim 138, wherein the pharmaceutical composition consists essentially of the modified oligonucleotide and aCSF.

141. A population of modified oligonucleotides of claim 63, wherein all of the phosphorothioate internucleoside linkages of the modified oligonucleotide are stereorandom.

142. A population of modified oligonucleotides of claim 64, wherein all of the phosphorothioate internucleoside linkages of the modified oligonucleotide are stereorandom.

143. A population of modified oligonucleotides of claim 65, wherein all of the phosphorothioate internucleoside linkages of the modified oligonucleotide are stereorandom.

144. A pharmaceutical composition comprising the population of oligomeric compounds of claim 80; and a pharmaceutically acceptable carrier or diluent.

145. The pharmaceutical composition of claim 144, wherein the pharmaceutically acceptable diluent comprises phosphate buffered saline (PBS) or artificial cerebrospinal fluid (aCSF).

146. A pharmaceutical composition comprising the population of modified oligonucleotides of claim 141; and a pharmaceutically acceptable carrier or diluent.

147. The pharmaceutical composition of claim 146, wherein the pharmaceutically acceptable diluent comprises phosphate buffered saline (PBS) or artificial cerebrospinal fluid (aCSF).

148. A pharmaceutical composition comprising the population of modified oligonucleotides of claim 142; and a pharmaceutically acceptable carrier or diluent.

149. The pharmaceutical composition of claim 148, wherein the pharmaceutically acceptable diluent comprises phosphate buffered saline (PBS) or artificial cerebrospinal fluid (aCSF).

150. A pharmaceutical composition comprising the population of modified oligonucleotides of claim 143; and a pharmaceutically acceptable carrier or diluent.

151. The pharmaceutical composition of claim 150, wherein the pharmaceutically acceptable diluent comprises phosphate buffered saline (PBS) or artificial cerebrospinal fluid (aCSF).
